United States Patent Application Publication US 2015/0267249 A1 - sequence listing, part 2

SEQ ID NO: 2005 - DNA, 2169 bp, Unknown
  Unknown gut bacteria
atggtttccggtcttgcgggcagcaagggtctgttcgacttcgtcggagcctgtgtgatcaaaaaccttaccgtttccggtgcgattaaagaaggcacaaacatgggtctgcttgcagacgtcagcgcaggtacggtagaaaactgcttcaccacgggttctttgcacagaatcaactcctacggcacaacaggcggcctcatcggacgcgcagacgcaggtacggtaatccgcaactgcggttctgctgcaaacgtcagctgctcgatgaagagcctgaaagcagagctcaacatgggcggtctggttggcaacctgtacggcacggtggaaaacagctacgcgaccggtaccgtcaaggtggaagcgggcagcggctatacggcggtcggcggcttcatcggccagaccaaaaacactgcggccattacgaacagctacgcggcaggtacagttaccggttctgcgggcggtgcgctcggcgcgttcgtcggtgtgaacagcggctcgatctccggcagctactaccgcgaggatgcggcagaagctgcggtcgcgaccggaagtgcagacggcctcacggcgatgacgaaggctgtcatgcagagcgatggcttcatcaaggatcatctcggtctggaacgctatcatgtcgacaccgacggcatcaacggcggctacccgatccacgcatggcagggcggcaaagaagcggaactgaccgaggacgaaaaggcagtcacgctcgacgttcgcgcgcttgtcctcaaagatgcaaaacaggcggcgcttgtacaggagctttgcgcgcaggtgcaggaggagacggacgcgtttgtcgcggaaacttccctgagtatgctccttacgtacatccgcgacgactggggctatgactgcggtgtattgacctcgccggaggacgcaaagccctacgtctatcagcagttctgcaaggaaaaagaagccgagtatctggaagaatacggcgagcagatcgacctgagcaacaccgagggcattttgacgcccgataacaacggcatataccatatcaaaacgcaggcgcagctggtgcttgcagcgacgggtgaaaacggcagccggatctcctggcattcggacagcgacgcactgaacgcggaaaccggcgcagtcacgctccccgaggcagacacgatcaccgtcaggctcaccgcgaccgcggcaaagggtacggcagaaaagagccgcgagatcactgttattctctactctgtgaaagctgaggccggaaacgtgctcggcagcatcgaaaaagcgctgtcggcaaaggatgcgtttgtccagcccgtgcagatccgcggccacgagacggcaatggacgccgtttcctactggttgtataacaacggctatgacgacagcatcgaggtcgaatttgtcagtgcaggtacgcttgcgacaacctctgttaccggccattcgtacctcgcagaagacggaaccgttacctattatcagggcgagggcggcacggacaccaagtatgtgacctacaccggcgtacagttcaagctttccaaactcggcgcagagaagacggttacggcgaacgtgcgcatcggctgggatgtggaaaaagcgcaggaactcatgcagagggcgctcgacgagcagctcacatgggaagccatccgcggcgaaaacaccaatacggcaaaggccagcacggataagagctttaccggcatggtcgtggacggagaagtttccgaaatgctcgtcgcaccgcgcacggtcacagtggacggcgttgcagtccgcgtcggcttcagtgtgaacccgtctgacgcggtgacctatgaatttacggacagccagatcaacatttcgccgcgccgtccgtcacagggcaaacctgccacaacgttcgagctgcggatggtcacgctgttcgacgaaaaccttgacccgtacacgatctctgccatgatgagcagcagcggcgacaatgtcagcacgctccagctccaaaacgcgttccgtattacggtaaagcccgagacagaagatgcgcagaatgtgctgtcgcagaatctcaaggataaactccccggtcttgtgaccaactactatgactacggcgcgaaggtcgacctgacgaagcctgtcaaggacgatctgctg

SEQ ID NO: 2006 - DNA, 669 bp, Unknown
  Unknown gut bacteria
atgagtttgtttgtttcccagctgtttaacggattgcagacaggttctgtgtatgcgctggtggcccttggctacagcatggtctatggtatcatcctgcttctgaactttgcccacggcgacatcatcatggtcggcgcgtataccgcgttctacgccatgactgcgttccacctgcacccgattctctccgttgttctggccgttgtcacaagtacgctgcttggcgttgtgattgagaaggttggttatacgcctcttcgctcggcgccccgtctttcgcttctgatcacagcgatcggcatttcgttcctgcttgaaaacggtgcgcagcttctgttcggcgctgacaccaagagcatggacacgcttgttcccggcaatgtgtcgttcggctccgtcacgatcagctatactgcgatcttgaccatcatcgtcgctgtcatcgcgatggtcgcattgacgctccttgtccagaaaacgaagctcggaaaggcgatgcgcgcggtctctgaggatatgggcgcggcgcagctgatgggcatcagcctcaacaaaacgatctcatttacatttgcggtcggctcagcgcttgccggtatcggctcggttctgtatctttgcgcgtattcccaggcatcgcccacgatgggctcgatgctcggcctg

SEQ ID NO: 2007 - DNA, 681 bp, Unknown
  Unknown gut bacteria
atgaacaagtacgaagaaattgcgcgctgcctcaaagctcgtattcggtccggcgcatatatccccggccagaagctgccctcggaggcggagctctgccgcgaattttctgcgagccgcctttccgtgcgcagcgcgatcggccagcttgcggcgcaggggctcatccggacgcatcagggcaagggctcctttgtctgtccgggcgcgccgtcaggggatacagagctttcctttcagggcgcttccatcagccggacggatttttttgagctgcgccggatcctggagacagagatcgcgggtctggccgcccaaagagccgggcaggagacgatcgaccgactgcgcgagctctcgtttcagatgcagcgcgccgagcgggaatcggagatggcggaggccgacgaggcgtttcatctgcttctggccgaggcctcacagaatgccgccatccgggccgtttttcagatgctccggccgtatatccacacgatgatggtgcagaacgtctccgtattgggcgcagacggctgtacggcgcatcttaaaatcgtcgcggcgatcgaggcgcgaaactccgaacttgccaagacccacatggcagagcacctcaaccgctccatggagcagacgaatatgctcaactatgtgaaaaagctggacgcaccggccgactga

SEQ ID NO: 2008 - DNA, 1095 bp, Unknown
  Unknown gut bacteria
atgctggttctgctcggcgcagtggtgcttctggccgttgtgctgatcgtcatcatttccagctgctcgaagaaaaatcagggtgcaggcatcaccgcgcaggccttttccaccggctcggagctgacgcttccggtcaacaccgagctcaacagcggagactatgtctcctacggcgggtaccagtttgaaacagggacgaagctttccaagatggcaaagctcatcacgaaaaataacgagaacgtcacggccacaagctacgataacgcctacggctcggcctacctcttcacgcgcgacacaggctcaggtgtggaaagctggtgtctgtaccagaaggatccggcgcacatctccaagtggtacatcttcatgggcaaccaccgcgaggtcgagctggcggatggaacgctggatcttctcttgccgctccacctgatttccgacagctatctgcgcgacaacatgggaagcaagctttctctcggcacagcttacgcctgcggcacaaagagcgccgaccagacgatgctcgagcagttcaaggaattctacgcgaattccggcctctacaatatgatcacgctcgaaacaggcttcattctgacggataaagccaccggccgcgaggtcgagttcagctttgaagagaacgacgagtcctcgtggttcacgctcaagagcaccatccccgaagagcccgagccctcgagccgcgtccagctcagcagcaccgacgcagcctccacggacgagcccaccgagctttcggaggccgacgcgctcacgctcagcaagatcctgatcgatgcaaactacaagaccggcacgaccgcgtccgagtatccctataaggcaagcctcaatggtacggattacatgctggagctcacatggaaggacgacacctggtccgcctccgtccaaagcggcgaccagaccgcgcgccttaccaccaagcaggcctgcaccgtcgcggccattcttgcctccaatggcgtgatgaaggttgaaagcgacgagagctcgtggccggatgaggccggtaccgtcagcccgatgggcgcgtgcatggtcacgacaaacgacgtg

SEQ ID NO: 2009 - DNA, 819 bp, Unknown
  Unknown gut bacteria
ttgccaaagctgctgttccagcgggtcgttgtggtgtcgctggctattttgctgcaaattttattcgtgattgcgggcatggattggctgcgcgaatactggcactggatgaagaccgcaatggacgtggtcaagtgggtcgcggtgctgacgatcatgaccggaagaagcaatccgtcgtataaaatggcgtggatcatcctgattctcgccttccctgtcgcgggcattacgatctatctgctcttcggcggcaaccgtatctcaaaccgcgagaaccgccgcatgaaccgcgtggaggtcatggttgcgcagcacctgcggcaggatcagaccgtcatgcaggcgctcgagcgggagaacattccggcatggaaccacgcgcgataccttctttcgagctcgcgctacccggtctatgataactctgcggccgtctatttcccgagcggcgagagctgctacgcgcggatgctcgaagagctcgaaaaggccgagcactatattttcctcgaattttttatcatcaataacggcaagatgtgggactccattctggaggttctgcaccgcaaggcgatgcagggtgtagacgttcgcgttctgtacgacgatttcggctgcatcacgcgccttccgatgcgctactgcaggaagctgcgcgagatgggcattgaggcgcacgtctttaacccgttcatccccgtcctttccggccggctcaataaccgcgaccaccgcaagctcatgctcatcgacggaaaggtgggatttacgggcggcgtgaacctcgcggatgaatacatcaacgaaatcgag

SEQ ID NO: 2010 - DNA, 858 bp, Unknown
  Unknown gut bacteria
atgatagcactgaaaattctgcctgcgggcgagaaagcatacgaaaggaacggggctatgaagatcacatttctcggaacgggcaacgcgcaggcgacggcctgctacaatacctgctttgtcatggaggaaggcggcaagtgcctgctggtcgacggcggcggcgggaacctcctgttaagaagattacaggacacgggctataaatggcaggatatgcgagacaacatcgtcacccacaagcacatcgaccacctgctcggcatcatctggatgcagcgcatgatctgccagaacatggcgcgcggaaaatatgagggtgaggcgcggctgtatgcgcacgaggaggtcatccggatccttcatcagatggcggagatgctgctgaccgagaaggagcggaaattcattgacgagcgctttttcctcatcgaggtcaaagacggcgagacgcgcgagatcatcgggcagaccgtgcagttttttgacattcactctacgaaggccaagcagttcggcttcgcgatgacgctcaaagacggtcgtaaaattgcctgctgcggcgacgagccgtattgcgaagcggagtacgaatacgtcaagggcagcacactcatgctccacgaggcgttctgcctctattcccaacgcgagatttttgagccctacaagaagaaccactccacggtcaaagatgcatgcgagttggcggagaaactcggcgtgccgaacctcgtgctctaccacacggaagacaagagcatcgaaaaccgcaaggcgctctataccgaagagggcaggcaatattaccatggcagcctgatcgtcccggacgatctggaaacactggaactttaa

SEQ ID NO: 2011 - DNA, 615 bp, Unknown
  Unknown gut bacteria
atgcaaaccggcatgtgggcggtgttcgccgcttcgttccggaaaaacctgaccgccattttcggtctggacggcaaaaccgcgcgtacggtaactgcgaacgcaaagcaaacgtatgcgcagattttaaaggagcttccggactttgagaagggcgaccggttcctcatgaatattgtcagctgcgcgatgctggccgcgttcgttctgagcatgccagagcgcccggatgtaacgcgtttgacctcgtattacgagcagtccatgatgacccccgccatgcggttttactgccgcaagagcggaagcaggcgcttttctcccgagagcctttcagccatggaaaaaactgcgcagtttcgcgccgcggaccggaacccgtattcctggaacatggactatctcccctatgccgacggctccggctttgaagcgcgcttcacggcctgcggcatctgtcagctgatgaaaaagcttgggctctacgatctcacgcccgctctgtgccacctcgactacccgatgaccgagaccggcggcacaacgaaatttgtccgggactacacgcttgcctccggcggcccctgctgcgactgcggctaccgcaaggtctga

SEQ ID NO: 2012 - DNA, 990 bp, Unknown
  Unknown gut bacteria
gaaacagctgcgcccgcagccgaagaaacggccgccgagcccgctgctgctgaaacggcagaagaaacctctgaagctgaggaagcccctgcaactgaagaagcaaagacgagccttgacatcgtgttcatccccaagggcgttgcagactactggagcatcgttcaggcgggctttgaaaacgcggcgaccgagcttggcatgacgccgagagttgtctatccgtccaaggaagaagccggcgttcagatcgaaaccgtgatggacgtcatcaactccaagccggacgcgattgtccttgcccctgtgagcggcgacgcgcttgtctccgcctgccaggaaatccagaaggccggtattccgctgatcatcgccgataccgccatccccacggaggactatctccagtcgttcatgaccgataacgtcgccgccggcgcgatggcagctgacgagctggctgcgctgatgggcgaagagggccaggtttacatcttctccgattctcccgcgaaggcttccgttgccgaccgtgtgacgggctttgaggcgagaatgaaggaagcttatccgaacatcgaggtcctcggcaccctctacagcgaagcggatatcaacctctgcacgacccagtgcgtcgatgccatcacggcaaaccccgacatcaagggcatcttcgctgttgacgagaaccgcaccgcgggcgttggcaccgcgctcatccagctcggcagagaagacatctttgtcggcggcttcgacgcgaacaagaacaccgtttctctgatggaagacggcgtgatcaacttcctgactgtccagcagccgtaccagatgggctacatggcgtacaaggcagcggctgacgcggccaacggcgtggagctcgagcacggcatggtcgacaccggctgcaccatcgtcccgagagacaagctggacgacgaggacatgcaggccatcctcttcccgctggagcacctgaactga

SEQ ID NO: 2013 - DNA, 1203 bp, Unknown
  Unknown gut bacteria
atggaacctgaaatcagtctttcgtgcaaagacttagtcaagacctatcccggcgttatcgccatggatcacatcaactttgaactgcgcaagggcgaggtccacgcgctgctcggagaaaacggcgcaggcaaatccacgctgatcaagtccattgcgggcgcgcaccagtgtgactccggcacgatcaccattgacggcaaggaatttcacagtctgacgccgcttcaggcgaaggaaatgggcgttgaggtcgtttatcaggaatttaaccagatgccgtctttatccgtcgcggagaatatttatctgaccgagctgcgcggcaagcgcattgtcgccgatcagagagagtttgagcgcaaggcagcggagcttttcaaggagatgaatctcgacctgaacccgaaggtcaaggttgcatcgctgacaaacggctacaagcagatggtcgaaattgcgaaggccatttccaagccgactaccaaaattctgattctcgacgagccgacggcgcctttgaccgtcgaccaggtcgacattctgttccggctgatccacaatctgaaggagaagggaatctcgatgatcttcatctcccaccgtatgccggaaatttttgagatctgcgaccgcgtgaccgtcatgcgtgacggcaagtcgatccagacgctgaacgtgaaggacacgaaccgtgaggagctcgtctctttgatggtcggccggaagctgaacgaaaacttcccgccgcgcgagacagaaatcggcgatctcgtgctcgaggcaaaggacctgtgcggcaacggcgtggagaacatctccttccagatccacgcgggcgagatcctcggctttgcgggtctggtcggcacgggccgtaccgaaacgctgcgccttgtctacggcgcggacaagatggactccggcgaggtttacatgtatggcaagaagcttcatatccgctcgccgaagcaggcgctggcgcatggtattgcgcttgtccccgaggacagaaagcttcagggcgtgttcctgcacatgagcatcaaggcaaacacgaatatttcgattcttccgaagatctcgaggggcattttcgtccaggcgcataaggaaacggaaaacgcggatcagtacatcaagagcttgcgcatccgtacgcccggcatgatgcagctggccggcaacctctccggcggcaac

SEQ ID NO: 2014 - DNA, 786 bp, Unknown
  Unknown gut bacteria
ccctttgcctttacgggtaataaatttgagttccggatgcttggctcggccaactccattgcctgcacgaacattatgctcaacggcgctgtcgcgcagtcgctcaaaggttttgccgatgcgctagagaaggcagatgactttgaaggcgcgctgcacgatctcatccgccgcacgattcacgcgcacaagcgcatcatcttcaacggcaacggctacgacgacgcatggatcaaggaagcaaccgaacagcgcggccttctgaacttaagaactacgcccgacgcgatgccgacgctgctggaaaagaaaaacgtcgacatgctgaccggcctcaagattttcacgaaggcggagctcgagtcgcgctacgagatcatgatggaaaactacgtcaagactgtcaccatcgaggcgcagacgatgctggacatgacgcgcaaggagatcctgcccgccgttgccggctacacgaaggagctcaccgagacactggctgccaagcgcgcgatcttaccgtcgctgccggcaaaatacgaaaccggcacaatcacgaagctctcttcgcttctcgaccagatcgacgcggcggcagaggagcttgaaaaaaccacgctccagatcaaagccattgacagcgtcaccgagtccgcgttccagattcgcgacgcgatgctcccgagaatggcggcgctgcgcgtggtgtgcgatgaggcagagcctctgaccgctgaacgcttctggccgttcccgacgtacgacaagcttctgtttggtgtgagataa

SEQ ID NO: 2015 - DNA, 864 bp, Unknown
  Unknown gut bacteria
atgaaaaagccgtccaagcccctgcacgcacgcggcgagctcaggtccgccatccggcgtcagcccgtcgtgtttgctgtctatctcgttctgcggctcatcgttcttgcgtcgctcgtgtcggccatcctccggcaggaatatgaaagcgcgtttgtgtgcgtgctggtgctgtttttgttcatgcttccgtttttcatccagaaaaacttcggcatctgccttccgagcacgctcgaaatcatcatcctgcttttcatcttcgcagcggaaatcttaggcgagctccagagctacttcatccagtacccctactgggacacgatgcttcacacgacgaacggctttctctgcgcggcggtcggcttttcgctgatcgacatcctgaaccgcgacgcaaagatcaagtttacgctctcgcccgtgtatgtggcgctggccgcgttctgtttttcgatgacgatcggtgttctgtgggagttctttgagttcgggatggataggcttttccacatggacatgcagaaggatacgatcgttcacaccatttcgtccgtgatgctggaccccacgaacagcaacattcccatcaccattgacggcattacctccgtcgcggtcaatggccgggatctaggctttcacgggtatctcgatattggcttttacgatacgatggaggacctgtttgtcaacttcatcggcgcgaccgtgttcagcgtgatcggttacttctatctcaagcaccggggcgagggcaaatttgcaaaggccttcatcccgaccattgaagaaacgaacaaggagcctgattctgaccatgtcaaagagccctcgcaggaagctgaaaatcgggacaattga

SEQ ID NO: 2016 - DNA, 867 bp, Unknown
  Unknown gut bacteria
atggaactgcgcgtcttacgctattttctcgcggtggcgcgggaggaaaatatcacaaaagcggcggcgctcctgcatgtgacgcagccgaccctttcccgccagctcatgcagctggaggaggaactcggcgtcaagctctttcgccgcagtcagtaccgtgttgtcctgacggatgacgggatgctgctgcgccgtcgggcgcaggagatcgtggagctggcagacaaggccgaacgggagctgcagcatctcgatgcggaactgacgggcgagatcgctatcggctgtggcgaatccgtgggcatgacctttctctcggaacacattcgtgcgttccgcaggctgcaccgtcaagtgcagttccgtatttacagtgccaacgccgacgatgtgaaggagcgcattgaaaaggggctgctggacatggggcttctgaccgagccggtggacattggccgatatgcttttctgcgaacgccgcaaaaggaccgttggggcgtactgctgccaaaggagcatccgctggcacagaaaagcacggtcacgccgaacgatttgttgggtgttccgcttcttcttagcagccgcgaaagcgtccgcaacgagcttgcggggtggttcggcgatacatacgacaaaatcgaagttgcagccacatttagcctgattttgaacgcggccaacatggtaaaaaacggtgtgggcgcggcgctgtgctatgattttggaaatctctctgatgcgctggaatttgtgccgctttctccaaagctggaaaccggaacggtgttggcgtggaagaaggatcagacctgctcaccggcggcggatcaatttctcgactttctcaaaaatgcgatttaa

SEQ ID NO: 2017 - DNA, 879 bp, Unknown
  Unknown gut bacteria
atgcgcgcattgaaaaccgtcggatatgtcatcagccataagaatggggagaaccgaagagcactttttccggcccagtgcacgcagctgaaatttccggagcaggcgatttttgagacgggctacggtcttagcctcggcttttctgacgcggactatgaacgcgcgggcgtgaagattgcctcccgggaggaggttttgcgggcggatgtgatcgtagacgtgaagctcggagatgcggagtatctggacgcgcttgtgcccggaaagatcctgtgcggctgggcgcacacggtgcagaagacggactttgccggaaaagccatccgcgcggggcatacggtcatcgcgcttgagcacctgcgggaaaacgggcggtaccttttttaccgcacccgcgagattgcgggcgaggctgcaattctgcatgcgttccgctattgcggcaaaatgccctacgactgcaaggtctgcatcgtcggcaacggccagacggccaagggtgcgatgcggatgctgacggggctcggtgcggaggtcgatatcttcgggcggaagatggaaaagacgttccgcaagctcatgttccagtacgatgtgatcgtcaactgtgtctattgggacacctcacgctccgaccggctcatctaccgcgaggatttaaagagaatgcgccccgggacgatgatcatcgatgtgagctgcgacccgtatctggagatcgaaacgtcccacccaacgacgatcgaccatccggtctacaccgtggacggcgtgatccactacgcggtcgacaacacccctgcgatgtacccctacacaacttctaaaattttcagccggaactttttaaaatatgccgatgcgctggcaagcggc

SEQ ID NO: 2018 - DNA, 915 bp, Unknown
  Unknown gut bacteria
gtcagcatcgtcccgccgctgtcggttgcaatttcgagctcgtccgcaattctctcgtggaacattgagggcgacgcgccggagagctggactgtcacgatcacaggcgcagacgattactccgacacgcagatcgtttccacgccgtctgtcacctttgagggtctgaccccgggcgagacgtatgaggtcatcatctccacgcccacgatgctgcaaagcgtctcgacgtcgatcacgccgaacatcacgaagctctcctcgttcacagcgaacgtcgacggcgaagatttggtccttgactggacgtgcgaggtcgacccggcagagcccggctggacgctcgaggcaaagatcgcgggaatcgatacgcccgtcacacttcccgagacagaggaagcgcctgttcgcattccgctttccgatcttgtaccggacgcggactatacgttcaccgtagcgctcaagagcggcgaaaagctcgagggtgagacgaaaacgacgtatcactcccccgccgtcacggacaaatacaccgaccacggcatggcgggcacatatcttggcttcttcctgaagcccgcgaatgtggaaaccgtcaacagtacgaatatttccaccacgcgcaacaactattacaccatcaacgagcagatggcctttgcgctgcagacgctcgtgacgctcgacacaaaggcggaggaagatatcgccgtcatgcttgttgtccgcgacgaggcgggcaagcttgtaagcttcgaggagtcgcatcggcaatggagcacgatgtgggagaaaaatctcttcgtcggtacgctctcgagcatgccgcagaaagccggaacctacacgcttgaaatctacttcaaccataagctcgtcaccaccaaggacttcaacgtccgcgaatcgtaa

SEQ ID NO: 2019 - DNA, 900 bp, Unknown
  Unknown gut bacteria
ctcctgctgcttctttgcgcctgtacatctgaaaaacaagcagatttacagccggagacgccggatatttcggaaagcgccgtctcctggaacgacctgacgtttgaccggacgcttccgctctcttacgccacgcagttttccgtcagctacgcgggagacgattatacccgcatcacgatcggaagcgatcaggagtttcttctggtggcagaaaacgccgagaccccggagcatattccggaacgcgtcaccgttctgcaccggccgctttctcatatctatctggttgcgtccgccgcaatggactattttgaccatctggacgcggtcgaccggatttccctcagcggcctcaaagcagacgactggtacatcgaaagcgcgaaggccgcaatggaagagggcagcatgcgctacgccgggaagtattccgcgccggactacgaggcgattttggagagcggctgcgacctcgccattgaaaacacgatgatctaccacacgccggaggtcatcgagcagctgcaaacgaccggcgttcccgttctggtcgagcgctcgagctatgaatcgagcccgctcggaagaatcgaatggctcaagctctacggcgcgctggtcggaaaagaggacttggcctgctcgcagtatgacgagctccttgccgcgctgtctcccattctcgatcaggaggcaagcggtcaaaccgtcgcatttttctacatcaattcctccggcgcggtcaatgtccgcaaatcgggggactacatcgcaaaggccatcgcgatggcgggcgggcaatatgtttcgttcgacgaaagcggcgaggaaaacgcgctgtccacgatgacgattcagatggaatcgttctacgcctccgctgtcgacgcggatatc

SEQ ID NO: 2020 - DNA, 1041 bp, Unknown
  Unknown gut bacteria
tacagctatgatcccagcctcccggctgaggttcaggcaacgattcctaaggacccggacacctacactgtgggccagaaggtcacaacggcagctaagcccaattctgtgagagttggcgaaaatatctggacgttcaagacgtggaagcttgatggcgtcgaggttgcaccgaacacgcaggttgagatggtttccggcggtctgcactttgaaggcatctgggaggcgaaactgatccactacagcctgacaatccagtacgtcgataagaaggggaaggaactggccgagagccatatggatctcctgtccaagggtgaagcgtacaaagtagactctccgaagatcaagggctacaagctcaagaacaaggatgacgcggtgatcgaaggtacaatgcccggtcgtaatctgaccatcgaggtcgtctacatcaagaagagcaccggaggcagttcaggtacgatcgactccccgaacaagcctacgacgaaggcaccggcgctgacgctcaacaccgatgaccacttcgcgtttatcaacggttatcccgacggctccgtgcagccggaaggcaatgtcacccgtgcggagaccgcagcgatcctgtaccgcatcatgggcgacgagtgccagtcctactacaagaccaacagcagctcctattcggatgttgcccgcggcgactggtacaacacctacgttgctacactcgagaatgccggcgtgatcgtcgacaccagaacgaacggcaagttccgtccgaatgacgcgatcacccgcgccgagctcgcttccatgatcgcgcagttcgccggtctggagagcgcttccgctgcgaagttcaacgatgttggctcgcgctactgggcagccgaggaaatcgcgattgccgcgaagatgggctggatcaacggctatcccgacggcagcttccgcccggaccgcaacgtcacccgtgccgaactcatggcaatggtgaaccgcgcgctcggccgcacgccgaagtctgcaggcgatctgttgtccggcatgaag

SEQ ID NO: 2021 - DNA, 903 bp, Unknown
  Unknown gut bacteria
atggaacagctctatcacttttccgcgcccggccgcacggagatcagcggcaaccataccgaccatcagcacggctgcgttctggccgccgcggtcgatatgcagacggacgctgaggttcgcctcaacggtacacacctgattttaatcgactctgagggcttcgcgccggtcacggttgacctcgacgatctgtccgtccacgaaaccgagaagaacaccacagcctcgctcgtgcgcggcgttgcggcggcatttcaggcgcgcggctgcaagcttcagggcttcgacgcgaaaatttcgtccaccgtgctccccggctccggtttatcgagctcggcggcctttgaggtcctcatcggcagaattttaaacggtctgttctttgagaacaagctctcggccatcgagattgcacagatcggccagtacgccgagaacgtctattttggaaagccctcggggctcatggaccagatggcgtcctctgtcggcgggctcgtgttcatcgactttgcggaccccaaaaagcccgtcgtcgaaaaggtcgactttgactttgcccactgcggccatacgctctgcatcatcgactcccacgcaagccacgcggatctgacggatgagtacgcggccatcccggtggagatgaaaaaggtcgcggccttcttcggaaaggaagtcctcaacgatgtggacgagagcgcgttctacgcttcccttcctgcccttcgcgcaagctgcggtgaccgcgccgttctgcgcgcgatgcactattttgaagagaatcagcgcgtccggctccaggtgcgcgcgctgcgaaacgacaattttggagcgttcctgacctacgtcaacgactccggccgctcgtcgtggctcaagctccagaacgtcacgccg

SEQ ID NO: 2022 - DNA, 717 bp, Unknown
  Unknown gut bacteria
tatgccacgcagatggaggcgggcgtggattctgccgaccttctcatcgcggtgacgatgtcggacgagctgaaccttctttgctgcctcgtcgcaaagaaaatcggcgcgcggcacacaatcgcccgcgtccggaacccggagtatagcggcgaactctcgctcatctcggacgatctggggctgagcctttctgtgaaccccgagcttctgtgcgcaacagagatcgctcggacgcttcgtatcccgtcggctatcaaaacagatacgtttgccaacgggcatgtggaacttttaaaggtgcagatcccgcaggactcccttatcgcgggcaagacgctcatggagcttccgagcctcgtgaaggccaagatcctgatctgcgcggtcgagcgcggggagcaagaggtctatattccctcgggctcgttccggctggaggcgggcgaccgcatctcgttcgttgcgtccatccgcgacgcgcaggcgtttttccaccagatcaagctcgcctcgtcgcgcgtgcggacggtcctgatcgtcggcggcgggcacattgcgtattatcttgccaagcagctgacggacctcggcgttggcgtcaaaatcacggaggtcaactatgagcggtgcttgcagctctcgtcgcttcttcccaaggccgagattctgcatggcgacggcacaaacgaaggcttcctgcgcgagtgcggcgtt

SEQ ID NO: 2023 - DNA, 2010 bp, Unknown
  Unknown gut bacteria
atggaggaaggtatgaagaagagaattgtctcgctggtgctggcgctggttctggtgctcgggctgctgccggggcctgtgatggccgcgtggcccagcttccggggaaacggaagcaacatgggcattacagacgtgcagacacccgcgcctgactatgcaaagctccaatgggcggctaaaatcggcacgtcggcggagagcatgacgacaagcaccgtctatgccgggcagccggtcgtggagggtgagtttgtctatgcgacggcggggcggacgctttataagatcaaggcgctggacggaaacgtggccgtgcagcaggtgatggacgggaaggaccgtttcggcacgatcccgccgacgatcgccggggacacgatctatgtggcgctggacggcggcatggtcgaggcattcaacaaggatacgctcgcgaagaaatggacgcttggcgggctttccgccggaggacagaacagctgcccggttctggtgtccgaaggccgggtctacacgggattttatgattcggagaccggcacacagaactatgtctgcctgacgacggcgggaaagcgcgtctggagctatgcaaacgcgggcggcttttactgggccggcgcggtcgcggtcggggactatatttttgtcggcacggacgatggcgcgaagagcggtgtgaacggaacctcgcgcattttgagcttccgcaaggacgagacgcgccaaaatcccgttccgcaggtgctcgagctgcaagaccttggcgaccagagaagctcgctcgcgtattccgaacagaccgggcggatttattttacgacgaagggcggctatctctgctcggcgaaggtggacggtacgaccggtacgctcacggagctcaggacctgccttctcggcatgggaagtacgagcacgccagtctattataagggctatgtctatgtcggaaccggcacaggtccggggccgagcggtgggtttgctattgtgaaggagaacgcgcagacgggtgatctgacgctccaaagggagctcacgatgcccggcagcacgcagggctcgccccttctgagcacagcgcgggaagcggaggggtatctctatttctatgaatgcgcaaactataagccgggcgggcttatctgcatccgggtgaacgcgaatcgcccggagagcacgaccgcgtcggacgtctttacgatctttgacgcggcggattatccggagtactgcgcggcaagcccggtctgcggagacgacggcaccatttattacaaaaacgactccggctatctgttcgcggtcgcgaaaacgcaggctccggcggtcaagtttacccggcatccgcagagcgcggcatatacgcccggaaagacggcacaggcccttacggtggaggcagtggcggcagacaatgcggcgctcagccatcagtgggagaagtcttcagatgaaaaaagctggacggccatcgaccgtgcgacgacgagcagctatgtcccggaaattccggcgaaaatcgagggcgagcaggtaacctattaccgctgcaaggtgacgtctaccctgaacgggaagacggcgtgggatgtgtcgcacacggcggccatcacggtcaaggcgctcagcgcggacacgacgatttcctatattgtgaccgacggcaacgaggaaccgacaggcgcaccgacggcggcttcggtcagtgaaacaacagttgtgctcaactatgcggagctgggggcgaagaaaccgcgcgtctggttccagccgccgcaaggcggcacgctgcgcgtaacgcttggtacgtgcgacgacccggcggcgcgctatgacggttcgggtgattataccgaccgcgtctacttccgaagtggtataacgggcacgaatatcatccgtgtcaccgcgacggcggaagatggcgtgacgcagacgacgtataccttcgttcttacgccggacggaaactatgacggcctgcggagcgtctatgtgacg

SEQ ID NO: 2024 - DNA, 600 bp, Unknown
  Unknown gut bacteria
ttgtgttttcaacagcttttatggtatactataagcatattagaaatccttgccaaagaggtgactgaaatggaagaacgcggattcatccgggacatgctggatgtgaaggttttgatcctgtttgtggcggcgacggcgaagtatccgctgacgctgcagaagatctatgagctgtgctatcaggacgatcggctgagctattttgatgtgagtattgcagtgccgcagatggttgagagcggacatcttgagcagctggcggacgagacgtatgtgattaccgaaaagggacgcgagcaggaggaagtgacgcgcgactcgatcgcgtttcccgtgatgcagcgggcaaaagcggccgtggaccaatataacgcgaagacccgtcgcagcgagttagtgaaaagcgaggtcgttgagcaggaggacgggagctgcgcggtgcggatgtacttaagagacgacgtggggagccttatgaagctggagctgaccgcgccgagcaagacgcagggaagggttttgcagcgggcgtttgagcagaaggcggagatcatctataacagcgttatgaagcagcttctgcagcaggagaaataa

SEQ ID NO: 2025 - DNA, 528 bp, Unknown
  Unknown gut bacteria
tacgagaagttctatgcggcgtttggcaggcatatcaaatacggcgtgctgaacgattacggcgcgaaaaaggagcttttgcaggacctgcttctttactggtcccacaagcagaacaagctcgtctccttcaaggaatatgtggacgccatgcccgaggagcagaagaatatttactttgcaagcggcgaaaatcggcagagacttgcgcagctgccgcagcttgagaagctgggggagaagggcttcgacgtgctgctgatgaccgacgaggtcgacagcttcgtaccgcagacgctcggaaagtatgccgaaaaggacttccgctctgtcacgcaggaggacctcggcctttccaccgacgaagaaaagaaggaagctgccgagcaggccgaaaagtcgaaggcaacgctggagtttgtgaagcagacgcttggcgacgatgtgaaggaagtgcgcctttctgaaaacctcggtacgcatcctgtttgcatggtaccggaagagggtatgacgtttgagatggag

SEQ ID NO: 2026 - DNA, 801 bp, Unknown
  Unknown gut bacteria
atgcagcaaacagcttcccacaacaggcagaaaaagcttgccgtcatcaacgacttctgcggcttcgggcgttgctcgattgcggtggcgctgccgatcatttcggcaatgcacatccagtgctgtccgctgccgacggcgatcttttccgaccacacgggctttgagagctttttctgcgaggactttaccgagcatatgccggcctatgcgggcgaatgggaaaagctcggattacactttgacggcattgcaacgggctttctcggctcggcgcgtcagatcgacatcgtcaaggactttctcgcgcggttcaaaggggaacatacgaaggttctggtcgaccctgtgatgggcgactacggaaagctctatccgacgtacacgccggagcttgccggaaggatgcacgagcttctgcgctttgcggatctgctgacaccgaatcttaccgaggcctgcattctgacaaataccccgtatcgcgaggattttaccgagcaggagctgacggtgctctgtgaaagactctcagagtcagggccgcaggagatcgttatttccggtatccatctgggcgacgatcttggaaacttcgtctattcgcagggggaaacggcgatgctctgcgcgcaccgcgtgggcggttaccgctccggaacgggcgatgtgttcggtgcgattctggcggcggacctcgtaaacggcgtgccgctggaggcgtctgtccgcaaggcagcggattttatcacgaaaaccattttgtacacccagaagctcggcgttccggacacagacggc

SEQ ID NO: 2027 - DNA, 597 bp, Unknown
  Unknown gut bacteria
atgcgttctgtcgtgccgatgaaaacggcgaaaattggatattttgttatatctgtcttgttctgtgtgctggggatcgtgctcatcacctcgccgggcacatcggtcgtctggctgggaaggcttctcggtgtgggcatgatcgtctttggagccatcaaactggtcggctatttttcacgcgacctcttccggctggcgtttcagtatgatctggcgtttggaattttgctgatcgcgatcggcattgtgacgctggcaaggccgaacggcgcaatgagctttctttgcatcgtcttcggcatccccgttctggcggacgggctatttaaaattcagatttcgctcgacgcgaagcgttttggtatcggtcaatggtggctggtgcttcttctggcggcgcttacgtgcgtaattgggctcctgcttgtcatccggccgtcggatgcggcgcgggcgctcatggtcctgatgggaatttctctgcttctcgacggcattttaaacatctgtgtcgcgtggttctgcgtgaagattgtccgaaaccagaggccggacggcattgacgaggaatatgaagagctgaaggacgagtga

SEQ ID NO: 2028 - DNA, 1293 bp, Unknown
  Unknown gut bacteria
atgttcgctgcgctgctggccgctattggcatgtatcttctcacagacgcggtcgggcaggcgctcgttgagcggatttatatgagcgagagcgcgcagaaccagcggaacctcgcgacagtctcgtcgtttcagacctacgcgcgcgagttcaatctcgcgtcctacgacaccgagcagatctcccgctgggcgatttcgcaggacgacacctacatcttattatataaggaccggaggcttgcgttagaggccggctggtggggcattgacgagcagagcgcgggcacggaaaatctggatgatctctataatgtgacgacctatcccgtctacctgcgagacggtgtgtttcaggccgttgtctacgatttttccgagacaaagctctatgacggcgtgcagatcggcgccatcgcgatggcctgcgtgacgtttgcaattttcatgctgttttataaccggcgcattacgcgcgcaatcgtggaaatttcaaacgaggtgcggcagatcggagacgggaacctgcaattgcagcttgtggcgagcggcgatgacgagctggcgcggctgaccgagagcgtcgaggagatgcgcagatccattctcaaaaagacggccgaccagcagcaggccttaaagcagaatcaggagctcatctccgccatgagccacgatatccgaaatccgctcacggcactgctcggctatctcgaccttgcccagagcgggcaggacagctcgcaggaggcttatcagagctacatttctgctgcctacagcagagccatgcagctcaaaacgctcaccgatgagctcttccggtactctcttgtcttcggcgcgcaggagcttccggtaaagctcgagcgcttcgacgcggcggcgctgctcgaccagatggtaggcgaggggattgtaatgctcgagcagaagggctttacggtcttacgcgcggtgcagccggtttcctgcgagatcgaggtcgacgcgtcgtattttaaacgtgtgctcgataacctggcggacaacatctgtaagtacgcagatcccgcgaagcctgtgcatgtccttgttgcgcaggaggcgggaacgcttacgatctgtgaggccaacgccgttttaaaagaccccggacaggtcgaaagcaaccgcatcggccttcgcatctgcgaaaaaatcatgcgccagctgggagggaccttcgaaaagaatctgacggacgataccttcactgccaccctcacccttccggcgcataatccggaaaacacggaaatacaaacctcttaa

SEQ ID NO: 2029 - DNA, 825 bp, Unknown
  Unknown gut bacteria
atgaaaaacaagctgatcaatatatttctgattcttgcgctggttgcgggactgtccctgctgctctaccccaccgtaagcgactactggaactcgctgcatgcctcacaggccgtcgcgtcatatgaccaggccgtgaaaagcatggacgagggcaaatacgacgaactgctgcaacgtgcggggcagtataaccgcgatctgtttctgcgcggaaccctcttcgctctgaccgatgaagagcgcgaggactataacagccagctcgacatcgacggctccggcgtgatgggctatatcgagattccgacgatcaaggtctcgctccccatctaccacggcacgagcgacgacgtgcttcaggtcgctgtgggacacctggagtggagctcgcttcccgtcggcggcgagagcacccactgcgtcctctccggccaccggggtcttcccagcgccaagctctttacaaatctggaccagctcaccgagggcgatttgttcgtcatccgcacgctcgacgaggtgctcacctacgaggtcgaccgcattctcattgtcctgcccagcgagcttcaggccctggccgcggaggaaggtaaggacctctgcacgctcgtcacctgcacgccctacggcgtcaattcccaccgcatgctcgtgcgcgggcaccgcgtcgataatcagtccgaggccgtgcgcctgactgccgacgccatccgcatcgatcccctgctcgtcgcccccatcgccgccatcccgctgctgctggcgctgttgctgctgctcgcggtcgctcccaagaaaaagaaccgggacgatacgtaa

SEQ ID NO: 2030 - DNA, 507 bp, Unknown
  Unknown gut bacteria
atgtctgatgtgatcgtaatcggcgttgccggaggcaccggcagcggcaaaaccacgctggtcaaggcgcttgtaaaccgattcggcgacaacattaccgtcctgagccacgacaattactacaagcgccacgatgagctgacctacgaggagcgcacaaagctcaactacgaccatcccgacgcatttgatacggatatgatgatcgagcatttgcagcagctgcgcgagggccatgccatcgagtgcccgacctacgactacacgatccacaaccgcgcagaggagacgatcaccatcgagccgcgcaaggtcatcgtggtcgagggcattttgatttttgcgagccgggtcctttgcgatcagatggacattaagatcttcgttgacgcggacgcggatgtgcgcctgtgccgtcgaatccggcgcgacgtcaaaaagcgcggccggaccattgactccgtcatcgagcagtacctcacgacggtcaagcccatgcacgagcag

SEQ ID NO: 2031 - DNA, 1278 bp, Unknown
  Unknown gut bacteria
atgcagacattttcgattccgtattataaagaccacgtcacgctgaacgttccggacgagaatctgaaggcggccatctatccgaaggcagagtcctatcaggcggcgcttccggaggcggagctggtgcgcgaggcgctggagcatccgatcggctccgagaagctctgcgagctggcgaagggcaagaaaaaaatcaccatcgtaaccagcgaccacacccgtccggtcccgagcaagatcacacttccgattctgcttgccgagctgcgcaagggaaaccccgaggcggaaattacgattctcatcgcgacgggcctgcaccgcgagacgacgcaggccgagcagcggcagatgtttggcgacaagatcgtcgacgaggagcgcattgtggtcaataacgcgttccgcaaggaggacttcgactttgtctgcaagcttccctccgacgcggagctgtgggtcaaccgcgaggcgctcacctgcgaccttctcatcacggagggcttcattgagccgcacttctttgcaggtttctccggcggacgcaagagcatcctgcccggtatctgcaacgcggcgacggtcaatgagaaccattcctacaaggctgtctccaatccgcacgcagctgcgggcgtgctcgagggcaaccccatccacgaggacatgctctgcgcggcaaaggcggtgcatgtgcagttcattctgaacgtcgcgctcgacgcgcagaagaagatcatcgcggcctgggcaggcgatctggagaaggcgcatgccgagggcgtgaaatttgtcaggagcctggcgcagtgcccggtcgtcgagggcgacattgtcgttacctccaacggcgggtatccgctcgaccagaacctctaccagagcccgaaggctgtggcgacggcggaggcctgctgccgcgagggcggcgtgatcatcatgtgctgctcctgcgcagacggtatgggcgggtcgaactttgagcggctcatcacgatgggaactgtcgacgagatcgacgcgtatctttcgaagatcccgccgaaggagtcgatctccgagcagtggtgcgcgcagatctattccaggatcctcaagcaccataaggtcattctggtgacgacgttcctggatcatgagctggtccgcaaggccaacatgatccccgcgtccgatgtaaacgaggcgctcgagatggcgcttgaaatgatgggcaaaaacgcgcaggtcgttgtcatcccggacggcgtggcggttcttgccgtgaaaggatga

SEQ ID NO: 2032 - DNA, 657 bp, Unknown
  Unknown gut bacteria
atgaaaaaacgactgatcattgcgctttgtgtgctgctggtgcttggcgcgggcgcgggttttgcgtattaccggttgtacagcacagcgcaggacgcggagcagatgcagcggacgatttttgagcagtatgaggcgatgctgcaaaacgcagagcagacgacgctcaccgtgacggaaaacggcgagacggtcggcgtgtatacactcgatgcgcttgggcttctcgatgcgacgaagcagacaatcgcagccgggtttacggcagatgaacgcatgaacccggatattttcgatcagaagggtgtgacggaaaagctcgagtggcgcgcgcagacgcacacgcagccgggcacggttcgcgccgatctcgtgcggtacaccgacgagcgggtcgtggatgatttagaggccatgtcccgcagacgggcgcaggacgcgtacatggagtttgacggcgaaaagttccgcgtcgtggatgaggtgcagggaaacgaattggagctcgagcctgtgcgcgcggcgcttcgggaggcggctgcagcgctcacggttgacgccagcgcgccgcagagcgtgagctttgaggtgaccggcgtttccgggtgctacgcgcagccggaggttacggcgaagaacgcggattttgactttaat

SEQ ID NO: 2033 - DNA, 1116 bp, Unknown
  Unknown gut bacteria
atgaaaaaaagatttgtagctttgttcctggccttcgtcctcgtttgcaccctgctggcaggctgcgcaagcaagactgagaccccggcaaaaacggaacccccggctgccgccgaaaccaccacggaaaccacaaccgaagcacccgctgctaccgagactgagacggaagctcccgctgaggaatctgacccccgcgccgaaaagatcaagatcggcttctctgtttccggttttgataacgaaaacttcgtctacatggatcagctgatgagcaagtactgctccgagaacaacatcgagtacctcaccgctgcccataactctgagtcctccgctctgatggagatcatggagaacttcatggctgccggtgttaacggcgtcatcttccagaactttgagccggactccatcaacggcacgctcgaagagatgatcgaaaagggcatcaaggttgtttcctacgactccgacaatgttcccgaaggcaccaccggctgctggatctgctccaactatgataccggcgttgtcatcggcaccgctgccgctgacttcatcaacagcgagctcgacggcgtctgcaactacttcatcatgaactccaaggtcgctttcatgcaggaccgcgtccagggcatcatcgacaccatcgctgagaagtgcccgaactccacgctggcctacgagcccccgaagatcgttctggccgaggctgttgagaccttctccaacatgctgaccgcttgccccgatgttcaggtcgtctgcaccggttactccacctgcgcgaccaacatcattgctgagtggctgccggagatccagcgcaagggcggcgacctgagcaagtacggcgtgttcacctgcgactgcaccaacctcgacctcgagtacatggcgcagactgtcaagggcgaaaacatcctccgctccaccgttgaccttggcctgaaggagctcgtcccgatgggcatgatcacgcagtgcgaagctgcgatccgcggcctggattgcgaatatgctgagggcgaagtcgttaccttcccgcacgatctggtcgacctgaccaactacgaggagactgctgcaaagtacaacgtcgagatctga

SEQ ID NO: 2034 - DNA, 474 bp, Unknown
  Unknown gut bacteria
gtgtttactacactccggaacgcctggaagagccccgagctccgcaaaaagatcctcttcacgctcatcgtgatgctgatctaccgtctcggcaactgcgtccccgttccctatgtcaacgtcgttgcgctgaacaactacttcaccacgcagctggcgaacaccgttcttggtctttataacgccatgtcgggctctgcgttctcgcaggctaccgtgtttgcactcggtattcagccctacatcaacgcctccattatcatcgagcttctgaccatcgcgattccggctctggaacgtctggccaaggaagacggtgaggaaggccgcaagaagatccagaacatcacccgctacacgaccatcggcctcgggcttctcatgggctttgcgtactacgtgatgctcaagaactacagcctgctgagccagacgggctttgtctacggcctcgtgatcgtcctgacctttacg

SEQ ID NO: 2035 - DNA, 975 bp, Unknown
  Unknown gut bacteria
atgaataaattattgaatcaaaagaaattatccgggctgggccccatcggtattttcgcagcgtcgatgatcattctgttcatcattacgccaagctttagaagcatggcaaacttcacacagattctgctgagcgcgtctgtgtatatgctccttgccatgggcatgagctttgccatcatcatcgacggcatcgatctttcggccggctccatcgtgggtctgacgggcggcatcgcctgcatggccatgacgtatctgaacttgcccgttccggtggccctgattctcggcgttttggtcggcgcggtgtgcggcctcatcaacggtcttctcattacgaagctcgatctcattccatttattgcgacccttggcggccagtgggtctacagaggtgcgctgaagcttctgaacaacggcgcgaccatcaccctgcgcggcacgatttccgacgaagcgcttgcaacgctgacttatatcggcaacggcaagttcctcggtatcccggttccggtctatctggtgctggtgatggcgatcgctctgaactttgtcctgcggcacaccgtattcggcagaagcgtctacgccgtgggcagcaacgccgagacggcgaagatgtccggtatcaacgtgcagaaggtgaagctgctggcgcagagcatcaccggtctgatggccggtatggcaggtatcgtcatgctctgccgcatggtgtccattcaggcgaacaccggcgagggctacgagtttgaaggtattttcgcttccgtcgttggcggcgtgagcatggcaggcggcgagggcacgatctttggcgcggtcatcggcgcgctggtggtcgcggtcctgcgaaacggtctgaacctcaatggtatcaactcgttctggcagcaggtcattctcggtgttctggtgctggtggttgtgtacgtggataccagaaagacgaagaaaaagagatccgtgtaa

SEQ ID NO: 2036 - DNA, 735 bp, Unknown
  Unknown gut bacteria
atgaattctggaaaacggaacacggcacgaaaggtcatctgccttgtgctggcggtcctgatccttggctcgctggtatcgggcgcacttatcatgacggttggtgcggcgagctcaaaggaaattgaaaaggagcttattgcgctgcgcgaagagcaggccgagctcaaaaagcagagcgatgcgctccagtcgtccatcaaggacaatcaggccaagacgcagacgctcgtagaaaagaaggcggatatcgaccagcagatggagatgtcccgccagtcgatcgaaaacctcaacgaacagatccagcagtacagccttctcatcgcgcagaagcaggacgagctcgagcaaaccgaggccgaggaggcgcggctcaacgagcagtacaagacccgcctgcgctcgatggaggagacgggcaaaatttcctactggtcgatcctgtttggcgccagcagcttctccgaccttctcgacaaggtcaacatgatcaacgagatcgccgcgtccgacaagctgatgctcgaaaagatggcagacgttgccgcgcagatcgcgactgagcgcgcagagctcgagacccagatggatgatctcgagcaggcaaagaacgatcttgctgagcagcagacagagatggagaagcagagagccgagtctgaccagctgattttgcagatggctgcggagtacgactccatgtcggaagagtatcagaactacgaaaagctc

SEQ ID NO: 2037 - DNA, 606 bp, Unknown
  Unknown gut bacteria
gcgaagtgcgatgatgcggcgggcgagcttgaactggcggaagcaggcggagagatccgcgtcacgctggcgcggaagcccgtgtttgaagacttcttcgcaaagtgcgacggcatcatcgccgcaaacagcaacgtctatccctacaaggcggtcaaggacgctgcgggcgactatctaatcagtgacagcgtgagaaactacggcaaggcgaccatcaccctgaccgcagaaaaggcgctgcgcctgtacttctcctactatggctcgacaacgagcgatgaggattgtccgttcgttgtcaagaacggaacaaagacgctgctggaggcttacggcgagacaacgtggaagactttcgcgacggatcttgccgcaggcgataagctgacgctgacctatgagcagccgtacgtctatggaggcggcgaaagcccctatcatgtcaagctcaaggacttccgcaccgaggcgctctcgaaggttaccttcacgcttggcacggagggtacggtcatcaccgtcaagaacgcaaagggcgacgtggtgacccccgacaaggacggcggctatacgcttccggacggcaattacacctacacggcg

SEQ ID NO: 2038 - DNA, 1248 bp, Unknown
  Unknown gut bacteria
agcagaaagctcacagcggccaggaagtcccttgcggccaatgagagggcggccaaaaaggtcagtgatctgatcgcctccaagctcaccggcgagcccgacggcatgggtctgaatgaccgcagaacgatcacgtccgtcgagacggcatacaataagctgacggatgcacagaagaccttcatctccgaggcagaaaaggccacgctggacgcgttcaccgcgcgcagagactatctcgatgcaaacgaagcggaaatgaaggccaacgaaaaggcggcctctgcggtcgaaaagctgatcaaggcgctgccgaagtctgagagggtcgattacaccgacaaggcagagatcgaaaaagcccgcacagcgtatgacgaactgaccgatgaccagaagaagctcgtctcgaaccttgataccctgactgcggcggaagctgcgctccggaaggcgctcgacgatgttgcggcggataaatctgcggcggaaattgtgatcgagatgatccaggcgctgcctgaaacggtcgtctatgatcatgatgacaagtccgacgaggctgagatccacgcagctagagaggcctataataacctcggcaaggtcggcaagaacatcgtcggcaaagacaacctcaagctcttgacgaacacggaaaaggcgctcaagaaggccgtttcgcaggataagaaggaccagaaggcagcggacaaggtcatcgccaagatcgaaaagcttccagcagcggaagacgtgatcgtgaagaacaagtctgctatctcggcagccagaaaggcttacgacaagctgaacgagaacgcaaagaagtacgcggatgacagcgcagaagtgattgccaagcttgcagactgcgaagaggcacttacacaggcaatcgaagacgaggatgcagcagaggcagtcgaaaagctcatcaagaagcttccgacggccaagcgtgtgaaggaagagcatcgcgagaaggtgcaggaggcgctggacgcttacaacgagctgacggcagagcagaaagagctggtcaccgcaaagaatcagcagaagctctttgactgctgcgctgcgctcgatatttcggtcgacggcggcgatattgatcttgaagcgctcgagctccagcaggaggaagcatcccgtcaggctgccatcatcgagcagttcgtgctggcagaggacgaggacgacgcttccctcgaagaggactttgacgagtctgtcgacgaataa

SEQ ID NO: 2039 - DNA, 555 bp, Unknown
  Unknown gut bacteria
cgcgaggtgaactggatgaaacggcatatcgcgctgctgcggggcatcaacatcagcggcaaaaacaaagtgccgatggcggagttgaagaaatgttttgaagcggccggatttctggaggttaagacttggctgaacagcggaaacgtagtcttttcctgcgaggaagcggatgcggcagcgctggccgaccgcatcgagcgcatgatgcagtgtgaatttggcctggatattcccgtttttgttattttacaggaggagcttgcggacattctgcgccatgccccggattggtggggaacggagaatcaggaaatttacgataacctcgttttcctcctgtcgcctgtaactttccaggaagtatatcacgagattggcgcgccgaaagagggattggaacaaatacaggaatatcggtccgctgtgttctggtcattcagccgaaaggagtatcagaaaaccaactggtggccgaagacggcccgcgcggatattggctcgaagctgacaatcagaaccgcgaataccgtccggaaaatcgtctgtatgtaa

SEQ ID NO: 2040 - DNA, 804 bp, Unknown
  Unknown gut bacteria
atgaatacctgtatcaaatgcggccgtgaaatcccggacggcgaactgttctgccgggagtgtgcgctgaaccccggcgcaatttcggaggaaggacacgccatgcccgccccacgcgggaaaatgcaaaagcccgtcgttcagccgccaaagccgaagccgatcccccagccgtccgcgcccgccgcgccaaaaaagcgccagagcggccacggcgtaatcatcgcgattctctgcgtcttcacggcgctgagcctcggcctgagcatttacctgattgccaacagtgcctcacagcgggtgtcgcttcgcctgcgggagtcggatctggaagagcgcgaggaaagccttgctacgctcgagcagtcgctccttgacgcgcagcaggagctgcagtcggcaaaggacgaactctcgcagcaggcgcagacgattgaagagctccagaaaaatttcacgtccgcccagagcacggtcagccagacgcagtatgacatgacgacccagcaggcggagctggagcgcgtgacggcagaaaaggaagcgctggagacggagaacgcatcgctcacacagtcgattgagacgctgacctccaccaacgaggaactcgcctcgacgaaccgtcgctatgtcaccaagtccaaattcatggacgcgtacgtcgtgtttgtggagaacgacggcacaggctattaccacaaatacggctgcgactacttcgcccagaccagcttctgggcctacagccgcaagctcgccgaggccaacggctacaccccctgcccgcattgcttcggctga

SEQ ID NO: 2041 - DNA, 1788 bp, Unknown
  Unknown gut bacteria
tcacgatgcagcctgtttggcgtggtgcttgcaagcgcgccgtgcctgatcatctgccttgtcatcctgcaaaccgagcccgggacgcttccgatgcttacgctcaccggcacgctgacgcttctcgttctgacgcagaagctgcgctttgataccacgcagtccggccaccggttggcgctgtatctgctcgttcccgtggcggttttgattgccggactggcgctcgtgttcccgcgagacagctatgtccgctccgactggtcgaagagcctgtctccgctggtcagcgagacggcagaaaagcttaccgtctttcgtaaaaacgccgcaacagggcaggtcgagttcgtctcgccgtttacaccaagcacacttggcaggtggccgtgggactcgagcgtgacaagtgtaaatctcaaacgagttggcccgcaaagaaagaccgggcggcacgtgatgcaggtctattccgatttttccgcggcttgtcacctacgcgcagactctatggccgtctatgaggacagccgccggtcagggttggcggatgaagactatgaaaattccggggtgtgctccggcgtgttgctttcgcccgacatgcagacgctcggattggacacggcgaacgagctgcaaatccggacggatatgaagtcctccattttctatgttccgtaccggccgctggagctgccaacaggcggagaagcagtctttgacgcgtacatcaaaaatccgagccagctgaccgagtattccgttccttacgcgtttgttgaagagacggcggatcggaacgcgcagtacgaggcgtttgtacacgaaacgtatacacagctgccggacaagatccgcgcggagcttgagccgtatgtttcgggggcgcgaacttcgcttcagacgaacacagacgcgatcctgacgcaaaagctagcgcaggggattgcgcaatacgtctcaaattccgcggcgtattctctggacaccccgcgtgtgccggagggggaggattttgcgctttggtttctgcgtgagagcgataccggctgctgcgtccattttgcgacagcgacggtgctccttcttcgtgcagccgatattccggcgcgctatgtgacggggtattatttcaagacggcggccggtcagtgggcggacgtgacagaggacgacgcgcacgcgtgggtggagtattatctggacggctatggctggcaggtgctcgacccgacgcccgccgcgcaggaggataccgcgtcttctgagccggaggaaaaaacgccagagcaggcacctgagccggaaaaaaccaagacgcagtctccggcgcccaatgagcccgagccggatgtcccggagcagaccactgacaagagtgagcccgcgcagccggacacggcgcaggagaatccggcagagaagacggttctgggcgcaatctgggcagttttgtttgtgctgctggccctgtgcgcgtggcagctgctgcttctgagcctgcgaagggccgcgatggggacgggttctaacaataaacgtgcagttgcgtactggcggcatatcgaatttttatgtaaacttgaccgtcccgacccgccgctggcgctccgtgagcttgccctcaaggcgcgtttcagtcagcataagctggaatcagacgagattggggtgctcgccgcattctcggacgcgaaaacaaatgagcttttggagaaaagcggacggctcaggcgtgtgttcctccgcctcggccttgcgctgcatccggtaaaatgcagataa

SEQ ID NO: 2042 - DNA, 513 bp, Unknown
  Unknown gut bacteria
atgtttgcggaaacatttgacgcgggactcaagggaacggacccagaccgcgcgaagctataccgcatctgtgaagaaaatgacgtcggcatcacagtcatgaagggcttcgccggcggcagactgtttgacgaaaagcattctccgttcggcgtgcgcctgagtccggtgcagtgcattcactacgcgctgacgcgtccggctgtcagcgccatcatgtgcggctacgacaccaaagagcaggttgatcaggcggttgcctatgaaaccgcgtccaatgacgaaaaggactacgcgtcggtgctttccaatgcgccgttccactcctaccgtggggaatgcacctactgcggacactgcaagccctgtgctgcacagctcgatatcgccatgattaacaagttctacgaccttgcaaccatgcagccggaggtgcccgctacggtacgttcccactatgaagcgctggagcataccgcatctgagtgcatcggctgccatgcctgcgaatcg

SEQ ID NO: 2043 - DNA, 501 bp, Unknown
  Unknown gut bacteria
gcctccgatgaagacaagctcaacgaggcgctcgaaaccgtgcaggaggtagaacaccgcgggctgaagattgatgagaagctcgagcagaagctgctcgagagcaaggcggcgtttgacgagggcatgcagaaaagcgaggaactgcgcaatttaatttctcagcttgacgagaaccacatggacaaggacatggcggcgctttacgagcaggcgcaggacatgtttgacgcggacaaaaagctcttccagcgcttcacgacgaaggacgagcagaacattctcaagaactgcaagaaagcgctcaagaagaaccagtccgcggcgcagaaggtcgaaaaacagatcgaaaagctcgatccggacaacgtcacgaccaagacggcgaagaccgtgcagaaggcgtgggacgcgtactggaagctgacggacgcgcagaggacgtttgtcgacagccttctctacgaaaagctggagcagtgctataacaatctgccgtaa

SEQ ID NO: 2044 - DNA, 999 bp, Unknown
  Unknown gut bacteria
atgattgcgcacgttggaaaaatcaagctgaaaagcgggtataatccatattatgtttcgacctttctcaacagcaaatatggatattaccagctgagacggcgcgggatcaaagccacccggccggagataaagctagtggagttttccgaaattatggtgccggttttttcggatcggttggacgagaaaatcgaagcaatccttggcgacgcaaacaggatattgtcttcatctgtggatgtgatgaaggaatgtgaatcggcgcttttaaaggcagttgggtttcaagctgccgtgtcttcggattcaggctgtgccattcggtcgtttgcggattcctattgccgttccggccgtcttgacgcggaatactatcagccgaaatatgaagcgattgcgcggagcctgaacacgagcgaaaccgtgcggtccctgtgcaggctgcatgatgagccctttctcccaaagaatcatgtaaaatatccgtacatcgagcttgccgatgtcggtcaatcgggcgatatatccggtgtggatgttcaatacggcgctgagctccccacaagggcccgccgcgttgtaaaatccgggcagatcattgtggcgtctgttgaaggctcgatgcaaagctgcgcgctgattacggatgaatatgacggcgcgctatgctcaaccggattctatgtgctcgattccgataaaatgaacgccgaaaccttgctggtgctttttaaatcgaaaccgatccagacgctgatgaaacagcgctgctccgggaccattcttacggccatcagcaaagacgagcttttgtcgatgccgcttcccctggtcgatgcgcgcattcaggaggggattgcagccaaggttcaggaggcctttgcgcttcgcaagcaagccaaacagctgctggaatatgcaaagcaaggcgtcgaaatggcaattgagcaaggggaagacgcggcgctggggtggctgcacgatcaggtcggctaa

SEQ ID NO: 2045 - DNA, 606 bp, Unknown
  Unknown gut bacteria
ttgcagctgcacgtggtgctgggggtcgaccgcgccggtctcgtcggagaagacggccggacgcaccacggcatgtttgacgtggggtacctccggcaggtgccggggcttaaaatttactgcccggcaagctttgccgagctccgcgtgatgctccgagaggcggttcttgccgatacctgtcccgtcgctgtgcgctaccccagaggcggcgagggcgcttaccgcgaaaacgcggaagaaacgcgcctgaaagagggaacgtcctgcaccgtcattacctacggaacgatgatcaacgcagtgctcgaggcggcggaagcggccgaaaaggatgggctgtctgccgaaattctgaagctgcggacgatcacccctatcgactgggcggccatcgaagcgtcctgccgcaagacgggacgtgtgctcgtggtggaggaaacatccgaccgcggctgcgtggcaaacgatattttctcgcatctggcgcaggcgaacatttcctgcgtctgcgcaaagcagaatcttggagcttccttcatcggtcacggcgcgatgcgggatctgtatgaattgaccggcctgaacgcgaatgcgctcttgggc

SEQ ID NO: 2046 - DNA, 849 bp, Unknown
  Unknown gut bacteria
gtcaacggctacggcttcgatcttccgtattacacgcagcagcttgccatggccaaggcgggcgaggtcatcacgatccagatggaggacctcgtgcccgaggtgacgctggaggagcttaaaaagacgtactttgcggacgttctggcttcctacgacagcccgcatactgcgaacgccgcaagaacgaaaaacctcgagcttgcctgcaaggcgattgacggtacgattttgaacccgggcgatgagttctcgttcaacaaaattgtcggcgagcgcacgaaggaaaagggctatctggcagcaatcgtctacaccgacggcggcaagagtgaatcgcaggagggcggcggcatctgccaggttgcgtccacgatctatacctgcacgctgctggcagaccttgaggtcacggagcgcgcgccgcacatgtatctggtcacatatgttgagccgggcatggacgcgacgatctattggccgagtctggattacaagttcaagaactcgaccgatatgccgctgcgcgtggatgcgtcagtttccggcggatacgttcatatcaagctcgtcggcaccaagcaggagcatgactacgatcatatcaagctccgcggcgtatatgcaagctcaacggcttggaagacggttgccgaaattaacggcaagaaaacggagatcacgattgccaagggcgcgggcgtggatgcaaacggcaaggccatcgatctggccgtagatgcagcgggcaacaagtatattcttggttctgtcacagagagcgaatataccggctacacgatcaacgcctatcgcgactttatcgcagccgacggcagcacaatgcgc

SEQ ID NO: 2047 - DNA, 1068 bp, Unknown
  Unknown gut bacteria
atgcgaaatatttcgaagtcctttcccggcgtaaaggcgctgcatggattttccatcgttttgaaagcgggcgaggtacacgcgcttgtgggagagaacggcgcaggaaagtcgacgctgatcaagaccctctacgggatccatcagcccgatggcggcgagatcgtcatcgacggcgttccgacaaaaatcaacggccccgcggacgcgctgagcaagggcatcggcgttgtgttccaggagctgagcgtctgtccgcatctggacatcgcgaataatatttttcttggctgcatcaaaaataagcacggcgtcatcgacgaccgctttgcccacgaggaagcagcccggttgatggaagaagcggtaggtctgcggattccgtctgatacccccatgaaggatctgtcgattgcagatcagcagatggtggagatcacaaaggtcacatccaagggatgcaggatcgtcgtgtttgacgagccgacctcgtccctgaccgaaaacgaaattgaacggctgttcaaaattatttttgcgctgaagaaaaagggcgtgggaatcatctatatttcccaccggctcgaggagcttcccgtaattgccgaccggatcacggtcatgcgggacggcacgcgcgtaaaaaccatggactacaaggatacgaacgataacgagatcatcagcctgatggtcggcagagaattatccaacatctatcctacatataaaagaacgatcggcgaggtcgtctttgaagcagacaacatccggcagggcacaaagcttgacgtgaagcacctggacgtcagaaagggcgagatcctcggcattgcgggtcttgtcggcgccggccggacggagacgcttcgcgcgctgttcggcgcggacgaggcggatgagaagcacgtgaagatcgcgggcagggagtataccttcaaaaatccctccgaggccatcgcggcgggcttcgtgtatatgacggaaaacagaaagtttgacggcgctgcgctgggactgagcgtggaggaaaacattacgatggcctccctgcggaagttttccaag

SEQ ID NO: 2048 - DNA, 957 bp, Unknown
  Unknown gut bacteria
gcttcggtcagtgaaacaacagttgtgctcaactatgcggagctgggggcgaagaaaccgcgcgtctggttccagccgccgcaaggcggcacgctgcgcgtaacgcttggtacgtgcgacgacccggcggcgcgctatgacggttcgggtgattataccgaccgcgtctacttccgaagtggtataacgggcacgaatatcatccgtgtcaccgcgacggcggaagatggcgtgacgcagacgacgtataccttcgttcttacgccggacggaaactatgacggcctgcggagcgtctatgtgacgatcacggatcagggaagcgtcgctgtggcgcagaagaagctttctgtggacgaccggaacggggacggcaaaattacgaacgacgatgtgctccgcgcggtgcatgcgaaatactgcccggacggtgtgagcggctatcaagcggcggatagcgaatacggcgcatatatcacgaggttctggggtaaggataccggcaacaccggctactggaatggcggccggatgtgcatgggacttgacgaggaggtctcggacggcgaccactttgtcgcgatggcgtatgtcaagtcttatccggagacggaaagctacgcgaagttcggggaattttcttacactgcgtccgcaaacgcggcggtttcaatctcgctggaaacagtgaccggctatgacgcctcatataacccggtcttcggcggctgcgagggcgcacagatcacggcctatcgcgccacggacggcgcgacgggagaggcattggaaaagaatctctatacagtcgcggaaacgggaaacggatattataccgtgacgttctcgcaggcgggagagtattatctggttgccgcgaatgaagagggaacgatcgtcccggcggtctgcaccatcagcgtttcggacggacagacgccgggtgaagaggttacc

SEQ ID NO: 2049 - DNA, 522 bp, Unknown
  Unknown gut bacteria
gggccgacggtcggcaagatggtcccgagaatggtcgactcgtcgaaaatcctgtatacgatctactttgcgctcacgctcgtacaggtggtattttacctggctggcggcatgccgctttttgactcgctctgcaacgcgtttgcaacggccggtacgggcggcttttcgatcaaggcagactcgttcgcgagctacagcccgtatttgcagacggtcacaacggtctttatggcgctgttcggcgtgaacttctcgatctacttcttcctgctgcaaaagaagttcgacctcgcgttcaaaaataccgagctccgctggtacgtgggtattatccttttctccatcgcgatgatcacggcgaacattctgccgatgtacccggacttccacgcggccatccatcacgcggcgttctccgtctcgtccgtcatcaccacgaccggcttctgcacggaaaactttgacctctggccagagttttcgcgcgtgattctggtgttcctcatgatcataggcgcg

SEQ ID NO: 2050 - DNA, 381 bp, Unknown
  Unknown gut bacteria
atgcaggtaggaaaagaaaacaaacagaagggagtgaagaatgtgggcagatatattgtcaaacgtattttacttgccattctgactgtacttatcatatgtgccatcacatttttcgtcatgaacgccatcccgggcggaccgttcaaccgggagaaagcgctgagcgcggcaacgatcgaagcgctgaacaagcgctacaatctggacaagcccgtcggcgagcagttcattttgtacatgaaaaatcttctgcacggagattttggcgtgtcgctgaaaaacggccgcgacatcaaggagatcatctcagaatccttcccgatctctgcaaagctcggcctcatggcgatcggcgttgcgctcgtgtgcgggacggtg

SEQ ID NO: 2051 - DNA, 3204 bp, Unknown
  Unknown gut bacteria
atggatataagaaatgagctcgaacagctcagagatgaaaagtacagggagttcggcttgtcgctcctgccgaatgtcgacaagagcaagatgatcggcgttcgcctgccgcagctgagagcggtcgcggcgcggataaaaaaagaaagccccaagggcgttatgcccgatctcccgcagggcgatatgtttgaagaaaagcttgtgcgcggattcgttattgcaagtgccgatctgccgttcgaagagcatctgaaagcggtggcggattttgtgccggagatagataattggtctgtatgcgacagcttcgtgaacagcctcaagtttttcaaaaaagacagggagcgggtctgggagtttttgcagccgtatttcgattccgataagccctatgatatccgcttcgcggtcgtttcggcgctcgattatttctcgaacgatgagtacgccgcccgcgccttcgaaaagtttgatgcgataaccaacgacgactactatgtgaagatggcggtcgcgtgggcggtctccgtgttcttcgtccatgcgccggaaaagacatggcagtatctcgaagataattgtctcgacgatttcacttttaacaagtcgcttcaaaagataatcgaatcataccgcgtcacgccgcaggacaaggcggaaatacgcgcgatgaaacgaaaaaaatataataggagcaggagatatattatgagcaacaaggtaagcagagcattttcaaaggttataaatctggtggttgcggccacggcgcagggcgcgagcaagggcgaattgggctctcccgatacgaccgaggagatgaagtcgatagcgcggacagccgccgaggagggcattgtcatgctcaaaaacaacggcgtattgcccatagcgaagaatgagaacgtatgtgttttcagcagacttcaaaaggattggttcttcgtcggctacggctcgggcggcgatgtcaacgagccctacaaggttaatcttctggacggcatgaaaaacgcagggataaaaatcgacgagcagacagaaaaaatatattccgattggataaagaaaaaccccgccgatgacggcgtttggggcttgtggccgcgctgccgcgatgagatgaagatagacgaaaagaccgttgccgcggcttcaaagcgcagcagctgcgccgttgtcgcaataggccgctctgcgggcgaggacagggaaaacacgctcaaaaagggcagctattatctgaccgacgatgaaaccgcgctgctcgacaaggtgactgcgaattttaaaaacaccgtcgtgctgataaacagcggcaatattatagatatgtcgtggatgaataaatacggcgacaggctcggcgcggtgctctatgtctggcagggcggaatggagagcggaaacgccatcggcgaggttctctccggcaaagcttcgccgagcggcaagctgcccgataccattgccgattgctacgagagctatccggcggcgaagaactttggcaaaaagacatacaacaactacgccgaggatatcttcgtcggctacagatattttgaaaccttcgcgcccgaaaaggtcatgttcccgttcggcttcggtcttagctacacttcgttcgaactgttcgacaagaccgtcatggaggctgacgacagaataatagtctccgtaaaagtcaggaatgtaggctctgccgcgggcaaagaggttattgaggtctactacggcgcgccgcagggcgagctcggcaaggcggcaaagagccttgccgcatatgaaaaaacgcgcactcttctgccgggcgaagagcaaagggtggtcgtgtcgttcccgtgcgccaatatggcgtcgttcgacgactccggcaaatccggcgcggcgttctgctatgtgctcgaagctggggactatcccatctatgccggcaccgatgtgcgctcctgcgagcagataggcgttcacacagagccggagcttcgcgtcaccgagcgtcttgcgagccgcgcggactgcgccccgaaagaggcgttcgaccgccttgtcgccgcgaccgacgaacagggaaaaatagaaaaagcatatgaatctgtcccgctgagcaccgtttcgcgccgcgaggagatagagaagaatctgcccgaagcccccgatttcacgggcgacaagggcataaaactcgaagatgtcgccaataacagagcgactcttgcgggcttcacggctcagctcgagaatgttgagcttgaggctctctgccgcggcgactatgtcatgaacagcaagctcggcactcccggcaacgccgcagtttacggcggaatacttaaatctctgcgcaaaaaaggcgtgccgcccgtcagcgcaacggacggcccctccggcatcagactccattgctatgcctcgctcctgcctatcggcacgctgctcgcgagcacatggaatcagcagctcgtccgcgagttgtatgctgtcgagggtgccgagatggcgcgcaagggctccgatgtcctgctcgcccccggtatgaatatccacagagatccgctctgcggcagaaactttgaatatttctccgaagatccgctgctcgccggcaccatgggtgcggcggtcgtgcgcggcatccagtcgcagggggtctccgcctgcccgaagcacttcgcctgcaacaatcaggagaccatgcgtatctataacgattcgcgcgtgtccgagcgcgctctgcgcgagatttatctcaagggctttgagatatgcgtcaaaaccgcgcacccgttcaatatcatgacttcttataataagataaacggcgtctggggacactatcattacggcacctgcacgcagatactgcgcggcgagtgggaatatgacggctgcgtcatgaccgactggtggatgcgcgcgagcaaagacccggatttcccgctgcttcgcaataacgcttaccgcgtgcgcggacaggtggatgtgctcatgcccggcgcgggagcgggctcgcgcaaggcaaaatatgacccgactctgctcgagagcctcggcaagccggacggcatcacccgcgcggagatattccgcagcgcgatgaataccctgcgcttcgtcctgcgctcgcatccgttctgcgctgagcacggactggataacggctaccgcccgggtcccgattggttcgagtgtcggtaa

SEQ ID NO: 2052 - DNA, 372 bp, Unknown
  Unknown gut bacteria
caattatttgacctggctcttaactcttgcggccttaccgactctgtctctgaggtaatagagcttgcttctgcggaccttaccgcttctgatgagctcaaccttagcaacgttgggggaatgtaccgggaagactctctcgacgccgacaccgtaggaaactctgcgaacggtgaaggtctcggaaacgcccgaacccttgcgggcaataacggttcattcgaaagcctgaattctttctctctcgccctcgcggatcttaacggaaacctttacggtgtcaccgatcttgatctgggggatctcgtcgcctgtcttaagcgaatcctgtgcaataactttgagtgcgtccattttatattcctccgttga

SEQ ID NO: 2053 - DNA, 741 bp, Unknown
  Unknown gut bacteria
atgtcagagcctattttacagataaatcatctttcaaagaccttcggcagccacgaagttctgcgcgacattgacttttcggtcaatccaggcgatgtcacgagcatcatcggcgcgtccggctcgggcaaatcaactttgctccgctgcataaacctccttgagactccgacctccggcgatatactctatcacggcacgaacatcgacaatataaaaggcggcgcgagcgcataccgttcgcacgtcggcatggtgttccagtcgttcaatcttttcaacaacatgaccgctctcaagaactgcatgatcggtcagacgaaggttctcaagaagtccagagctgaagccaaggcatccgcactgcattatcttgaaaaggtcggcatggcgccctacatcaacgccaagccctcccagctttccggcggtcagaagcagcgcgtcgcaatagcccgcgcgcttgcgatggagcccgaagttctgctgttcgacgagccaacgagcgcactcgatccccagatggtcggcgaagtgctcgaagtcatgcgcaacctcgcaaaagagggtctgacgatgatagttgtcacccacgaaatggcgtttgcgcgcgacgtttcaacgaatgtcgtattcatggcagacggactcatctgcgagcaaggcagcccgaaggacatcttcgagaatccgcaggatcccaagacgcaggagttcctttcaagattccttgcgaaataa

SEQ ID NO: 2054 - DNA, 291 bp, Unknown
  Unknown gut bacteria
aacatggctctcggcagtctgcggggagttttgtttttctatgaaaggaacatcgaaatgaaggatttacttatatccatcgctcagggtctcgttgaagagcccgatgcagttaccgtcaccgttgacgaaccggatgatgagggcgttacagtctatcatctccacgtcagcgagaatgacatgggcagagttatcggcaagcagggcagaatagccaaggctatccgcactgttatgcgcgctgccgcaacgcgctgcgatgagaaggtcgcagttgagatagactga

SEQ ID NO: 2055 - DNA, 2226 bp, Unknown
  Unknown gut bacteria
atgttcgaggatttcaaaaagtttgaaactgaaatcgccggcagacccttcgttgttgaagtcggcaagatggctcagctcgcaggcggttcgtgcctcgtccgttacggcgagaccgacgtgctctgcaccgcaaccatggctgcaaagccgagagagggcgtggatttcttcccgctttcagttgattttgaagagaagctctattccgttggcaagattcccggttcgttccagcgccgtgagggcagagcgagcgagaaggcaactcttgcatcgagagttatcgacagacccatccgtcctctgttccccaaggatatgagaaatgatgtcagcgtcgtggctaccgttatgtcggtcgaccccgactgccagcccgaaatcgccgctatgctcggcgtttccatcgcgctctccatttccgagattccgtgggacggcccgatctccggcgtgagcgtcggtcttatcgacggcgagtatgttatcaaccccaccgaggctcagcgtgaagtcagccgcatggctgtcaccgtcgcttccacctccgacctcgtcgcaatgattgaggcaggcgcaaaggaagtcaccaatgacgagatgttcgacggcatcatgttcgcccacaaggagaaccagcgcatcgtcgagttcataaagggaatccaggcagaagtcggcaagaagaaaatcgacttcccctcaaatgatcccgcacccgagatgtacgaggctatcaaggatttcgctatcgatgatatccgcgtcgctcttgacaccgatgacaagcgcatccgtgacgagcgcctcaagcccatctatgagaaggttcatgagaagtttgacgagatttatcccgacgagatagagaagatcgacgactgcctttacaagacccagaagttcgtcgtgcgccgctggctgcttgacgacggcaagcgcgttgacggcagaggcattgatgagattcgcccgcttgcggctgaaatcgacctgctcgacagagtccacggctcgggtatgttcaccagaggtcagactcaggttctgaccgtcaccaccctcggccccgtcagcgattctcagattcttgacggcatcgacggcgaggacaccaagcgctatatgcaccactacaacttcccctcgtactcggtcggcgagaccaagccctcgagaggccccggacgccgcgagatcggtcacggtgctcttgcagagcgtgctcttctgcccgttatcccgagcgttgaggagttcccgtactgcctgcgccttgtctccgaggttctttcgtccaacggctcgacttcgcaggcttccatctgcggctcgaccctttcgcttatggctgccggcgtgccgataaaggctcccgttgccggtatctcctgcggccttgttaccgagggcgaccgcttcatgaccatggtcgatatccagggtcttgaggacttcttcggcgacatggacttcaaggtcggcggcaccaagaagggtatcaccgctatccagatggatcttaaaatacacggtctgacccccgccatcatccgcgaggctcttgacaagacctacaaggcacgctgctacatcctcgatgaagttatgctgcccgttatctccgagcccagaaaagagctctccaagtatgctcccaagatgctcaccaccaagatcgacaccgagaagatcggcgatgtcatcggcaagcagggcaaggttatccagaagatctgcgcagaatgcaactgcaaggtcgacgttgaagaggacggaaccgtcttcatctccgctatcgacattgacgatgcgaagcgtgctctcaatatggttgagaccatcgcgaacgatcccgaggtcggcgctatctacaagggtgttgttacccgcctgatggacttcggcgcattcgttgagatcgctcccggcaaagagggtcttgtccacatcagccaccttgatgtcaagcacgttgaccgtgttgaggatgtcgttgctgtcggcgacgaggtcatagtcaaggttcgcgagatagacgaccagggcagactcaacctctcccgcagagacgctcttatcgaggtcgagggacttgttcccgagaacgacctgtccgatgagccccgcagagctcccagaagggacaaccgcggcggcagagacggcggaagaagagataaccgcggcggcagaggcggccacggcggaaagagatattaa

SEQ ID NO: 2056 - DNA, 825 bp, Unknown
  Unknown gut bacteria
aagcccgcgggcggcaaacccgcgggatttttcaggaagaaaggaagtttcagaatgaataagcagctcagaaaacccgttatcgcgggcaactggaaaatgaacaacactcccgcagaggctaccgctctcatcgaggctctcaagccccttgtaaaggacgccgactgcgaggtcgtctgctgtgtcccctatatcgatctctatgcggctcttgaggctgcaaagggcagcaacatacagataggtgccgagaactgccactgggcagagaaaggtgcattcaccggcgaagtcagcgcgaagatgctcaaggcagcaggcgtgccctatgttatcataggccacagcgagcgcagacaatatttcggcgagaccgatgtcaccgttcgcaaccgcgtcagagccgctctcaacgagggtctgaaagtcatcctctgcgtcggcgaagtcctctccgagcgcaaggacggcatcacctctcagatagtcagcgcgcagaccgagatagctctcggcggcgtatccgctgatgagctcaagaacatcatcatcgcctacgagcccgtctgggctatcggcacgggcgagaccgcaactcccgagcaggcgaacgaggtctgcgccgttatccgttctcttatcgagagactttacggcaaggacgccgcggacgctatcgttgtccagtacggcggatcgatgaacgacaagaacgccgcagagctgctcgctcagcccgatgtcgacggcggtcttatcggcggagcttcgctcgtcgcagagaagttcaccgctatagtcaacgccgcaagcgcaaaataa

SEQ ID NO: 2057 - DNA, 1362 bp, Unknown
  Unknown gut bacteria
atgaaaaagaacatcgcaggcaccgaggaaagagtctccgcgtcaagcaaattctggctttgctcggcggactgcctttgcacaacgataaacagcctgctgacaggcggaggaatgacatatttcttcacgaaattcctcggtctttccgagggacgcgcgagcacggtatggatgatattcgccatatggaacgcattgaacgacccgctgttcggctatatctccgaccacacgaagtcgaagctcgggcgcagaataccgtatataagatacggcgcgttcttctattcgctgattttcgtgctgacatgggtcagatggccgctcggcagttcgcagacggctctgttcattcagatgctcgcaacgctgttcctgtttgacacgctctacacggcaatcgcgacatccatctacgtcatgccctacaccatggcggtgtcgaacaaggcgcgcagcggcatcttcctgtggaagatattcttcacactcatcgcgatggcggttccgctcgttgttttcccgctgataaagccggaggtcggaagcgacccgacaaaattccagctgataatggcgggcataggaatcctcgcgttcgttatcatattcacatctactttcttctacaaagagaaagtcacgaccgagagcgacaagaacgaaaacattttcaaggcagtcatagactgcttcaagaaccgctcgttcgtcgttttcgaggtgctctcgtttactgtagtattcattcagacgatactcatgcagggcgtcatatactactttgacgaattcgacctgccgatgccggtagcctacggagcattggggctcggcgcggtgctcggggttatactatgggcaaataaagtcaggacatggggcgtcaagaaatgcgtattcatcatgtgcgtgatattcgcctgcggctctgcggcgatggcgatattcggcaagataagcgtcattgccgtcctcggattcttcaccgcaggcatgggatttgcgggcggaatgtaccttgttccgctgatgaacggcgatgttatcgactacgatgaaagcatcaccgggctgcgccacgagggcatgtacgcgggagtcaacagcctgataacaaagcccgcgataagcttcgcgaactccgcgtttctgctcatagccaaggcattcggctacgacacgaccctcgcctccggaatgcagagcgaatgggcaaagcagggcgtgctcgtcgcatggatggctgtacccgctgcactgcttataatctgcgcggtaagcctgaagttctatcccctcgccggagagaaatgggacgaaaccaaaagagcactcgaagaaaaacacagagactga

SEQ ID NO: 2058 - DNA, 372 bp, Unknown
  Unknown gut bacteria
atggccgacgagactattcagttctcaataaaaaacgaaaacgacgaagaaatgaaaaagatactcctcgaggtttacaacgcacttaacgaaaaggggtacaattcggtcagccagatagttggctacatcctttctgaggatccgacatatatcaccacccacaacaatgcccgcagtcttgtgcgaaagctggacagagacgagctgctgcagagcatggttgaggattatctcggaatcaaaaaaataaagtgcaactataacccgattggagtgacattgagtggcggagaacaagaagcttctcatgtacaagggcaagccccttgtcagaaaagacaacacgctttattacggatacatggatga

SEQ ID NO: 2059 - DNA, 1182 bp, Unknown
  Unknown gut bacteria
atggacatactcggaatcttgaaaggcttctgggagagctcgggtctcgccgtgctcacctggagagaaggcgtaatgatcctcgtatcgttcgtcctgctctatctggccatcgctaaaaaattcgaaccgctgctgcttcttcccatcgcgttcggcatcctgctcgcgaacctgcccggcgcaggtcttatggatgacccgaccggtatcatcgacccgctgagtacgacgatacgggagggcgcgcactggtatgacatcggaatcctgcgtcttatctacgcaggcgtcaagagcagtatcttcccgtgccttatctttatgggcgtcggcgcaatgacggactttggtcccctgctcgcaaacccgatgagcctgctgctcggcgctgccgctcagctcggcatctatgttgcattcaccatcgctatcctgctcggctttaccccgcaggaggctgccgctatcggcatcatcggcggcgcggacggcccgacggctatattcctcgcctcaaagcttgcagctcacctgctcgcaccgatagcagttgcggcatattcgtatatggctcttatcccgatcattcagcccccgatcatgaagctgctcaccacgaagaaagagcgctcggtcgagatgaagcagctcagaaccgtcagcaagacagagaagattatcttccccgtcgtcgtgcttgtcatctgcgctttcatgcttccctccgtcgctccgcttatcggcatgttcatgctcggcaacctgttcagagagagcggcgttgttgaaagactcagcgacaccgcacagaacgcactgaccaacatcgtcaccatcctgctcggcgttaccgtcggcgcaacggcgaacggtcagaccttcctgtcgaagcagaccatattcatcatcatcctcggtctgactgcattctgcttctcgaccgcaggcggcgtgcttctcggcaagctcatgtatcttgtcaccaagggcaaggtcaatcccctcatcggctccgcaggcgtctccgccgttcccatggctgcgcgcgtttcgcaggtcgagggacgcaaggcaaacccgacgaacttcctgctcatgcacgcaatgggtccgaacgttgcgggcgttatcggctcggctgttgccgccggtttcctgctcctgctgttcggcaaataa

SEQ ID NO: 2060 - DNA, 585 bp, Unknown
  Unknown gut bacteria
atggagtatatccaggggctggacggccagatatccgtctttctgcattcgctcggcatcggctttctgctcggagtgttctatgatgccgtgtgcgccgtccgcgccgttctgccgggcgggcgcaaagtcatattcgtgaccgatattctctatgtaatagtctgcgcctttgcttcgttttgttttatactcgtgctcaatgacgggcgcaccctgctctatatcctcgcggcgcagctgctcggctttgcagccgaacgcctgagcctcggcgcggcggcaaaacatctcggtctgctcatttcgtcaaagctcagaaaactcttttggcggataaaagacgccgtcagcaagccgctttgcagcttaaaagaaaaaatatcacagaaattaacgccgcccggagaaaaagacgaaataatgtcaaataaaaatgaaaaaaatattaattacctcttgaaaaaggggcgcaatatgttgtatactttgaataggcaaatatgccccaaagcaagaaaacagaaggtcaaagggaaacgtaagaatgtcggaaaaaaagcgcagactcaaaaaaaggcatag

SEQ ID NO: 2061 - DNA, 462 bp, Unknown
  Unknown gut bacteria
atgacagcaatgggaaacaccgaaaaggcagagcttaccgtgatgtgcatgatctgcgacggcacgaagatactcgtgcaggacagagtgaacaaggactggccgggtgtcaatttccccggcggtcatgttgagccgggcgaggcgttcaccgacgccgtgcgccgcgaggttaaagaggagacgggacttgatatcttccgcccgacggtatgcggaatcaaagattttatccgcgacgacggcacgcgctacatagtgatgtttttccgcgccgaccgcttcagcggcgagctcaaagactccgacgaaggcagagtattctggatcgagcgcgacgagctgacgcagtataagctctcgcaggatttcatcgacatggttcatgtcatggaaaacccgtcgctgaccgaatttttctatgagcgcgacggtgaaaattggaagaagagaataatataa

SEQ ID NO: 2062 - DNA, 360 bp, Unknown
  Unknown gut bacteria
atggaacacaaccacgagaagatgctcgatatggtgaggcacgagctgccgacagacgagttgctttgcgacctgtccgatctgttcaggctcttcggcgacacgacccgcgtcaagattttgttttcgctctttgagtcggagatgtgcgtttgcgctattgcggaactgctcggaatgacgcagtcggcaatatcgcaccagctcaagatactcaaggacgcaaatcttgtcgccaaccgccgtgagggcaaaacaatctattattttctttctgacgaccatgtcagaacaattatagccaaaggtttcgaacatcttattgaagaaaggaacgagaacaatgaagaagatctttaa

SEQ ID NO: 2063 - DNA, 2817 bp, Unknown
  Unknown gut bacteria
atgctgaatgttaagcccgtcaaaaaaggaacgaccacgcgcatgagcttcggcaagatcgaagaagtcatggagatgcccaatctcatcgaggttcagaagaactcgtacaaatggtttctcgacaccggactcaaggaggtgttccgcgacatagcggaaatcaccgactacaccggcaactgggtgctgacctttatagactatcgcattgacgagaagactaaacacaccgtgcaggagtgcaaggagcgcgacgctacctatgcagcccccatgcgcgtcactgtgcgtctgctcaacaaggagacgggtgcaataaaggagtccgaggtttttatgggtgagttccccatcatgaccgacagcggcacctttgttatcaacggcgcagagagagtcatcgtctcccagctcgtccgttcgccgggcgtatatttcgatatgacccacgacaagaccggtatcgagctgttctcaagcacaatcaaccccaaccgcggcgcatggcttgagtatgagacggacataaacgatgtctattatgtaagaatagacaagaacagaaagatattcatcaccactttcatcagagcactcggactcggtacggacgatgagatccgcgagttcttcggcaacgatgagagaatcgaagccaccatcgagagagacgagacgaagaaccagggcgaagcgctcatggaagtcttcaagcgtctgcgtcccggcgagcccgtgacccttgagtccgctcagcagctgctcgacaatctcttcttcgatccgcgcagatacgatatctcgcgcgtcggcagatacaaatataataagaagctcgccattgccgcccgccttgcaggctgcaagcttgccgagcccgttatcgctccgctgaccggcgagattcttgccgaggcaggcgaggtcattaccaaggcgaaggctaaggagatcgagcgcgcaggcgttatggtcgccgtcgccgatgtcgagggcaagaaggtcaagatcatctccaacggcatggtcgaccctatggactatgtgcccgagggagtgaccaaggaagagcttcttgaagccggcatcaacgagaaggttcgcttccagataatcaccgagatagtcgacgagtgcggcgacgacaaagaggctcttctcgagcagctcagactccgccacgacgaccttatcccgaaccacatcataatcgacgatatcttctcttcgataaactatatcaactgccttgcgaacaagataggcaccacggacgacattgaccacctcggcaacagacgtatccgctgcgtgggcgagctgctccagaatcagttcagaatcggtctgtcgagaatggagagagttgtccgcgagagaatgactcttcaggctcaggagaaggaggagaacatcactcctcaggctcttatcaacatccgtcctgtcatgatggcgataaaggagttcttcggttcttccccgctgtcgcagttcatggatcagatcaacccccttgcagagctgactcataagcgccgtctttccgccctcggtcccggcggtctttcaagagaccgtgcaggattcgaagtccgagacgttcactactcgcattacggcagaatgtgccccatcgagactcccgaaggttccaacgtcggacttatctcctaccttgcaactttcgcgcgcataaatgaatacggtttcatcgaggccccgttcagaaaggtcgacaagaccaccggacgcgtcaccgacgaagttgagtatatgacagccgatgtcgaggacgactacattgtcgcccaggcgaacgagccgctcgacgagaacggaatgttcgtccatgagagagtcaacgcaagacacagggacggcttccttgagatcgaccgcatgaaggtcgactatatggacgtctctccgaagatggtcgtctccgtcgcaacttcgatgattccgttcctcgagaacgacgacgcaaaccgagccctcatgggatcgaacagactgaagcaggcggttccgctgcacaagaccgagagccctatagtcggcaccggtatggaatataaagcggctgtcgactccggtgttgtcgtgcttgcaaagcactccggccgcgtcacaaaggtcgatgccgagcagatcgagattctcagcgacgagaacattctcgaccattacgatataatcaagttcatgcgctccaaccagggcacatgcgtcaaccagcgcccgatagtcaccctcaaccagcgcgttgaaaagggcgacgtcatagccgacggtcccgcaacggatcacggcgagatatccctcggcaagaacgcccttgtcggcttcatgacctgggaaggctacaactacgaggacgcggttctcatcaacgaaaagatggttcgcaacgatgtctacacctcgattcacatcgagaagcacgagatcgaagcgagagatacaaagctcggacccgaggagatcacaagggacatcccgaacgtctccgacgatcttctgagcaaccttgacgagcgcggcataatccgcgtcggcgccgaagttcactccggcgacatccttgtcggtaaggtaacgcccaagggcgagaccgagctgaccgcagaggagagactgctccgcgccatattcggcgagaaggcgaaagaggtcagagacacctccctcaaggtctcccacggcgaatacggcatcgtcgtcaaggtcgaagagttcacccgcgagaacagcgatgagctcgcacccggcgtaaacaaggtcgtccgctgctatatcgcccagaagcgt

SEQ ID NO: 2064 - DNA, 618 bp, Unknown
  Unknown gut bacteria
atggcacaggtattcccgacaaaaagcaatctgatgagcacgaagaagtcgctggatctcgccaagctcggctatgatctgctcgaccgcaaaagaaatatactcgtgcatgagatgatgcagctcatagacaaggcgtcgaagatacagcaggagatagacgagacctattcaaaggcttatcttgcgctccagcgcgcgaacgtcacgctcggcatgtgcgccgagttcgcgcaggcgataccggtcgatgagtcgctcgatatagatcttcgcagcgtcatgggcgttgaactgccggttgtgactctcggcgatgagaagctcgatatgtattacggactcaactcgacgaattcacagctcgacgaggcttatctgagcttcgtgcaggtcaagcacatgaccgcagagctcgcggagatagagaacagcgtataccgccttgccgatgcgataaagaaaacgcagaagcgtgcgaacgcgctcgacaatatcatgatcccgcagttcaccgcgacgataaaatatatcaccgaagctcttgaagaaaaggaacgcgaggatttctcgcgcctgaaagtcatcaagagacagaaggaagaaaaagagtcgtaa

SEQ ID NO: 2065 - DNA, 585 bp, Unknown
  Unknown gut bacteria
gcaggatatataataaaaagaaaggacaggaggaaaagaaccatgatgaacatatggcacgacatagctccggagagaataaagagcgacgactttgtcgcctgcattgagatatccaagggcggcaagaacaaatacgagatggacaaggagaccggcatgctcaagcttgaccgcgtcctctacacctcgacccactaccccgccaactacggcttcatcccgcgcacatacgccgacgacaacgacccgctcgatgttctcgtgctgtgcagcgaggcgatactgccgatgacgctcgtaaaatgctatccgataggcgttatcaagatgatcgacagccagtctatcgacgaaaagataatcgccatccccgaccgcgacccgaactacaacgcatacagagatgtcaacagcctgccgaggcacatactcgacgagataatgcatttcttcagcgtatacaaaatgctcgagggcaaggagacgatagtcaaggagctctgcggacgcgacgttgcgatagatatagtcagcaagtgcatcaaggcatatgaggacaagttcggagacgaacagaactga

SEQ ID NO: 2066 - DNA, 1011 bp, Unknown
  Unknown gut bacteria
atggcaggcggaatgacctatacagccgttgaatcaaccgctatttccaccgcggaatattacggcaagacccttgttgagctcggcgcagagcatcccgaagttgtcgcgctgaccgctgacctcggcaaatcaacaaagatcggtatgttcggtgaggcttatccggacagattcttcaacgtcggtatcgcagagcagaacatgttcggcgtcgccgcaggtatggcgagagcaggactcgttcctttcctttcgaccttctcggtcttcgcttctctgagaagtgccgaccagctccacaccgacatctgctatcagaatgtcaacgctaagataatcgctacccattcgggtacttcgttcggtcaggcaggctcgacccatcacgctatctgcgatctcgcagttacccgtgctatgcccaacctcaccgttatctgccccgcagacggtatggagactgtcaacgcagtccgtgcggcatatgagacccccggcccgttctatatcagaatcaacagaggcttcgaccgcgtcctctataaggacaccgattacggcttcgagctcggcaaggcagtcactcttaaagagggcaccgacatcaccgttatcgcttgcggctcctgcgcattccaggctctccaggcggctaacttccttgagaattcggacggtcttaaagtcagagttcttgatatgcacaccatcaagcccatcgaccgtgaggctatcctcaaggctgttatggagacccgccgcataatcaccgttgaggatcacaatgtcatcggcggtctcggcagcgcggttgcagaggttgttgttgagtccggtaagggctgcgcattcaagcagctcggtatccaggataagtttgctcccatcggactgcatgaggacatcatgtccatgctcggtatcgactccaacggtatcgttgacgctgtccgtgaggtcatgggcaaggacttcgagcttgatgacgattgggacgacgaggtgtaa

SEQ ID NO: 2067 - DNA, 435 bp, Unknown
  Unknown gut bacteria
atgtttgaacttatacattatgaacgcagaaatcagcgtgcactctttaatcctttcagagatatggaaaacttcgagaagaacttctggggcgacatggccgcaacagacttcaagactgatataaaggacaacggcaaggaatatgtgctcgaggcagagctgcccggattcaagaaggaagacattcacgtcgacattgaagacggctacatgaccatcagcgcagagcgcagcaacgagaccgagaagaaggatgacaaaggcaactttgtccgccgcgagaggtcttacggctcgttcagcaggagcttcgatgtctcgtccgtcaagaccgaagacatcaccggcgaatacaaggacggcgttctgaccctgacgatgcccaagaaagaagaaaacgtgccgacatcgagaaggatcgagatcggctga

SEQ ID NO: 2068 - DNA, 630 bp, Unknown
  Unknown gut bacteria
ggcgcaagcatacggcacctgcatcggacaacaaaggaggaaaaagtaatggcattagtaccttacgttatcgaacagaccagcagaggcgagcgttcatacgatatctattcccgcctgctcagcgacaggataatcgtcctctccgacgagataaacgacgcaacggcgagcgtagtggttgcgcagcttctcttccttgagggtcaggacgccgaaaaagatattagcctttatatcaacagccccggcggttcagtcaccgcaggcttcgcgatatacgacaccatgcagttcatcaagtgcgatgtttcgaccatctgcatgggcatagcggcatcgatgggtgcgttcctgtttgccgcgggcgcaaagggcaaacgccttgtgctgcccaacagtgaagttatgatccaccagcctctcggcggtgctcagggtcaggcgacggagataaagattgccgccgatcatatcctcaagaccagagagagaatcaacagaattttagctgagaatatgggcaaaccgattgagtttgttgagcgcgagaccgagcgcgacaatttcctcacagcggaggaagccgtcgaatacggacttgcagataaaataatttacaacagataa

SEQ ID NO: 2069 - DNA, 1026 bp, Unknown
  Unknown gut bacteria
atgataaatgaagtatatcagcttatagcgcccaagctcattgacacggcgtacaaggagatagacctctcgaagaacgaggtcattctccgccccgtcaagatgtcgatatgcaaggcggatcagcgctactatcagggcctgcgcaaccgcgccgtgctcatgaagaagctgcccatggctcttattcatgagtgtgtcgccgaagtaatatatgacccgagcggcgtgttttcggtcggagagatgctcattccgatacccaatacacccaccgagaccgacccggtcatcgccgagaactatctgcgttcgagtcacttctgctcgagcggatatgacggcttcatgcgcgactatatccagatgccccacgaccgccttgtcaaggtgcccgagggcttcgatatgcgcgtcgcttcgttctcggagcttgtcagcgtcagcgtgcagtccatctcgcgcttcgagaagttcgcgaattccaaccgccgcagaatcggtatctggggcgacggaaacgtcggatttataaccgcactgatgctgcactatctctatccgaacgccgagctctatatcttcggtacggttgaggacaagctcaatttcttcacctttgcaaaagagacattccatgttgacgcggtgcctgagggagtcagcatcgaccacgcgttcgagtgcgtcggcggccccggctcaagacccgcgataaatcagatgatagacctcattgagcccgagggcagcatttcgctcatgggcgtcagcgagaacttcgtcgatatcaacacgagaatggtgcttgaaaaaggtctcaatctcttcggctcttcgcgcagcggcaggaaagatttcctgcgcacgatgcagattttcgcagagcatccggaggtcggacactaccttgagaatcttatcggcgatgagttcaaggttcgcgatatcccggatatccacaaggcgttcaacgccgactatatgagaaacttcggcaagaccgtcatcgattgggacaaataa

SEQ ID NO: 2070 - DNA, 402 bp, Unknown
  Unknown gut bacteria
atggacaaccagtttgacttcttatttttgaagggaggactttccttgataagacttgaaaatcatctcggcgttatcgagatatctcagccctatttcgcgtccctcatcggcaatgccgcctcctcttgcttcggagttgcgggcatggccaacagcaatatgcgccagggtctgcgttccgtctttaaaaagaacggtcattttgccgaccagggcatctccgtgcgcaaggacggcgagggtcttattgttgacctgcacataatcgtgtcctacggagtcaacatatccgccatatgccaaagcatcgtcaacaaagtcagatacacagtcgaagaggctacgggacttgaggttcacgcagtcaatgtctatgttgacggaatgaagaacgaataa

SEQ ID NO: 2071 - DNA, 1578 bp, Unknown
  Unknown gut bacteria
atgggtagatatttgagaaaacaatgcaaagaggggaaaactgtggcaagacaggaatcaaaagtttcgtcattctttcagaagataggcccgatggtgggctacaatgccgcgagcatacttttcggcggcggcggatacatcatctcgctctattttctgtcgtttttgaccgaggtcgaaaagctcagcgtcgatcaggcgggtatggttatcgccatggctcatatctgggacgccgtaaccgaccccgtcatgggtattataaccgaccgcacgcgttcgaaatacggcagacacagaagatatctgctctggggcgttatcccgatagctgtctcgtatttctgcctgtggaactcgttcggcatttccgcgaccggcaacaagaccgcgacgatgctctactacatgctcgcgtatatgctctataacacggcgctgactctcgtcaccgtgccgcatgttgcgatgctgcccgttatcgcgcccgattattccctgcgcactcagtataactccgtgcagtatataatgaactccgtcggcatggtttcgtcgttcctgctcgtgtcgctgtcgctcggctttacgaacatggagatgaccgccgcgtcaagaccgaagttcatgttcttcggcgcagtgttgtgcctgtggttctcgctgccgctgctcgtgactttcaaatgcacgaaagagccgagctcgctcgacatgaagctgccgcctttcaatgcgactatgctctttgaagagtacaagcaggttttccgcaacaaggcgttcagacgctatttcgtcctgagctcgatgtacaccatggcaaagggcttctatgcaaactcaaaccagtatttcatcaaatacagtgcccagcgcttcggctatttcaacaccctgcaaacgattgcgggtgcggctgaggcatccggcttccccgtcaactatctgctgacgatgaaaaagggcaagcaactgtgcggaaagctcctgactccgctcatggcggcgggacttatcataaacctgttcatcggcaagagcactccgctctgggtcgtcattgtttcgatagttctctataacttcggcttctccggccccggcttcaccgccacaaatatccagcccgatgtcacggatgttgacgagatgataaccggacgccgccgagagggcgttatctcaactttcaatacgctcatcaaaaagaccataaacggtctcatgagcgcgttcaccggatttattcttaaaggcttcggcttccgcaccggcgcagagggcgcgaatgccctcgaacagaccgccaagggtatattaggactgaaagtgacttactgcatcctgccgctcatcttcgtcggcctcgtctatgtctgcgtgtttacctataagatgacccgcgaggatcacaagatgataaccgaggctataaaagagaagaaagagaccggcaagtgctcactgacccccgagcagatgaaacgctgcgaggagatagcgggtcagagcttcggcgatatgtggatcggcaaaccctccgcagagacccttgtgaccgagcttgactaa

SEQ ID NO: 2072 - DNA, 1404 bp, Unknown
  Unknown gut bacteria
atgaaatacgacgtagttatcatcggcgcgggccctgccggaatattcacggccattgagcttatccgcaagggcgcgaacaagaaaattatgatggttgaaaagggtcagccgattgaaaagcgccgctgccccaaatcgaagaccaacaagtgcgtcaactgcaagccctattgccacataacgaccgggttctccggcgcgggcgcattctcggacggcaaactgtccctgagccccgaggtcggcggtcagctccccgagctcatcggctacgatgtggcgcagaagaccattgaatatgccgacagcatctatctcgagttcggcgcggacacccatgttgagggcgtcggacgcgaagaggaagtcaaggagataagaaagcgcgcgataaaagcgggtcttcgcctcgttgactgcccgatacgccacctcggcaccgagaaggcgcaggacatatactatgccatcgagcagtatctcatcgaaaacggcgttgacatgctcttcggctacgagtgcgacaacataattcttgagggcgaccagtgcaagggcgtctatgtccgcaagggcgacgagaacatagagattttcgcggatcacacggtcatcgcgaccggacgccgcggcgcagactggctcgaaaagctctgcgctcagcatgatatatcccatcagcccggcacagtcgacatcggcgtgcgcgttgagataagaaacgaggtcatggagaaggtcaacgatgttctctatgagtcgaagctcataggctatcccaggccgttcaagaacaaggtccgcacattctgccagaatcccggcggctttctcagccaggagaactacgacaacgacctcgccgttgtcaacggacactcatacaaagagctcaagagcaacaacacgaacctcgcgatactctgctcccacaacttcaatcagccgttcaaccagccgatcgaatacgcacagaaggtcggcgagctgacaaacatgctcggcgcgggacatattctcgtccagcgctacggcgatatcctcgacggaaagcgcacatggcagaaggagcttgaccgctcgaatgtcagacccactctccccgacgccgtcgcgggcgacataaccgccgccatgccctaccgcgcgatgctcaacataatcaacttcatccaggctgtcgactacgtcgtgcccggcttcgccgcggaggagacactgctctactcccccgagctcaagttctactccaaccgcatcaagatggacgaaaacttcgacacgaacgtcaagggactccactgcctcggcgactcgagcggctggacaagaggtctgatgatggcgtccgtcatgggcgtgctcatgggcagaagcatcgcagacagatacagcgagtaa

SEQ ID NO: 2073 - DNA, 312 bp, Unknown
  Unknown gut bacteria
atgttccgatttttccgtaaggaggaagcaaaaatgacaagtacattcataattgtttcggttctcgaagttgccgctgtggctcttataataacaggctttgtgtttgagaagaagctgatcaattttgaggagaagtttgagactgctcttgccaagaagatcgctcacttcctctgcaccaacaagtataccaaggctcattttgtcaaagagaagaagaccgctcagcgccgcagcgcagccaagactgcgttcgagcccgagaccgtctctccgactcccggcagaaagggcaacagagttgcctga

SEQ ID NO: 2074 - DNA, 264 bp, Unknown
  Unknown gut bacteria
ttattcaccgtcggcatatacgccgagatgttaagttttattatacacataaacatattctctgtcaaatattcaaactccgccgcattcaaagcgggagcgcgtgagagcaccgcgcgcggatgcgaaggacagggaaagacaaattcagttgttttcggcgaaaatcacggaaaatcggagcttttgtgtccgttcggagccgtgcccggctgcatattgggtattatattacattatataggcagaatatgtgaactttga

SEQ ID NO: 2075 - DNA, 792 bp, Unknown
  Unknown gut bacteria
gtgatagacgtaattgacctgaaaaagaacttcggggacaatgaagtcctcaagggcatcaacatgactatcaacaagggcgacatcgttgttgtcatcggcccgtccggctccggaaagagcacattcctgcgctgcctcaactgcatggaggatccgacctccggcaagattatatttgagggcgtggatatcgccgaccccaaggtcgatatcaatatccaccgcagaaagatgggaatggtgttccagcatttcaatcttttcaacaacaagactgttattgagaacataatgctctcacccgtgctctgcgccaagaaggacagacgcaaggctgtgatgcacaatatgttccacaaggataagctgcctgtgcgccccgtcaaggagataaagaaagaggcggaggagaacgcgcacaagctgcttgagcgcataggactcgaggacaaagccgatgtctatccctcgaccctctccggcggccagaagcagcgagtcgcaatagtccgctcgctcgcgatgaaccccgaggtcattcttttcgatgagccgacgagcgccctcgatcccgagatggtcggcgaggttctcgacctgatgaagcagctcgcccgcgagggcatgacgatggtcgtcgtcacccacgagatgggcttcgcccgcgaagtcggcacgaagcttgtgttcatggacgagggcaaaatagttgaggaaaacacgcccgaaaagttcttcgccgatccgcagagcccccgcgccaaggatttcctttcaaaagtactttaa

SEQ ID NO: 2076 - DNA, 495 bp, Unknown
  Unknown gut bacteria
agtactgccgtttctgcaggaagcatactctccacaaagaaacaaagtaagtcgggaggtataagaatggcgaaaaaagagaacacctctgccgccgcaaaggtcgccaaggctgaaaagcaggccgcaaaaggcgccgatgacttcaagcttacttctgcccagaaggtcgctaaggctgaaaagtccaaagcgaaagccgcaaaaccgaagaatcccaacgggaatgtcttccagcgttttgtcaagggcttcaagaagttctggaaggacttcagaggcgagatcaaaaagatcacatggcccggcgcgaaaacagttctcaagaacaccggcgtcgtgctcgtttcggtcgctgttgtcggcgtagttatctatgccatcgaccagggtctgtctttcctcgtatccaagcttattgagcttgcccagaagaccggcgagaacaaggaaactgccgccgcgatcctgagcatgatcaatctcggcttataa

SEQ ID NO: 2077 - DNA, 894 bp, Unknown
  Unknown gut bacteria
gtgtcgttctcatcggatgtcaagcaggaactcgcgcaggtgcctgtgctttcggattgctgcgcgcaggcaagagcctacggaatgctgctcttcggcagaatgttttccgtctccgagatatcctttgtcaccgagaacgagaatatcgcgaagctctactgcgatgttataaaagagctttttgatattactccgtccgtctcgtcgggcgtgtcaaaatacatggtttctgttgccgacgaagcggacagaaaacgaatcctcgaatttttcggccacagcgaaagtgacatttctttgcgtatcaacagagcgaatcttccggaggactgttgcttcggcgcgtttctgcgcggcgtttttatcgcctgcggaacgataagctcgcccgaaaaaaactatcatcttgagttttccgtctcgtataaaaagctttgcaatgatttgattcaattgcttgacgaggtaggattcgatccgaaatatgtcaggagaaagtcgagccatatcgtctatttcaaagtcagcgagaagatagaggagttcttgaccctcgtcggtgcagttaactcaacgctcgagcttatgggaatcaagatgcacaaggatatggtcaaccatgtcaacaggcgcgtcaattttgaaaatgccaatttgagccgcactgtcgatgcggcgatagtgcaggttgaagcgatagaaaaaatagaaagaaccgtcggactcgagagtctgcccgcgccgctcgccgaaatggcgaagctgaggcgggacaaccccgaagtgagtctgagcgagcttgcggatatgactgatccgccgctcacgcgctcgggtgtcaatcacaggctcaaacgtctcgttgaaatcgccggcggtatagggggctga

SEQ ID NO: 2078 - DNA, 1323 bp, Unknown
  Unknown gut bacteria
gagagaggcaaaggcatgaagctctgggcgggacgcttcagcaaagaagccgataaaaagaccaacgatttcaactcctcgataaaaacggacagccgcatgttcaacgaggatatcgacggcagcatcgcccacgcatcgatgcttgccgcaaaagggataatctccgaggaggactgcaagaaaattcttgcgggactctcggacatccgaaacgacattatctcgggcgagctgatgatagaccccgacgccgaggatatccacacttttatcgaaggcgagcttacctcgagaatcggcgacgcgggcaaaagactccacaccgggcgcagcagaaacgaccaggtcgccgttgacataaggctctatctcaaaaaggatgtgccgcaggtcacgggtctcataaacggacttattgacgcactcgacggcaaggctaaagaatacgcccactgcatcatgccgggctacacgcatcttcagcgcgctcagccgataactttttcggcgcacatcggcgcatatatcgagatgctccgccgcgacctcggacgctttgaggacgccgcgggcaggatgaactactccccgctcggctcgggtgcgctcgcgggaacgacatatcccatcgaccgcgccatgaccgcaaaggcactcgggttcgacggttatatgcccaacacccttgacggcgtatcggacagagacttctgcctcgagctgctcggggcgtgctcgatactcatggttcacatctcgcgcctgtgcgaagagataatcatgtggtgctcatgggagttcaaatttaccgagctcgacgacgctttttcgaccggctcaagcatcatgccgcagaagaagaaccccgatctcgcggagctcgcgcgcggcaaggcggggcgtgttataggcgacctctgcggactgctcacgacgatgaaaggtctgccgcttgcatataacaaagatatgcaggaggacaaggacgcaatttttgacggcatggacacggtcaagatgtgcctgacggctctgactccgatgatagcgacgatgaagatgattcccgagaacatgagaaaggctgccgccggcggattcataaatgctacagactgcgccgacttcctcgtttcaaagggactgccgttccgcgatgcctataaagcgacgggcgagctcgttgcactttgcatcaaaaaaggtacgacgctcgaagagctgccgatagacgaatacaaaagcatctgcccgcttttcgacgagggcgtgtacgatgcgataaaccttgaaaactgcgtgacaagacgcggaatgtaa

SEQ ID NO: 2079 - DNA, 1047 bp, Unknown
  Unknown gut bacteria
atgaaaggcaacgaagctctggcagaagccgctatccgtgccggctgccgccacttcttcggttatcccatcactccgcagacagagcttgcggcatatatgtcaaaggttatgcctaaaataggcggtacatatcttcaggcggagagcgaaatcgccgccgtcaatatggttctcggtgcggcatccgcaggtgtccgcgcgatgacttcctcgtcctcgcccggaatcagcctcaagaccgagggtatatcttatatggcaggttcggatcttccggcggtcattatcaacgtccagcgcggcggccccggactcggcggaatccagccctctcagtcggattattggcaggcgacaagagcgcccggccacggcgatctgcatattctcgtttttgcgcccagctccgttcaggagatggtcgatcttgtcggcagagctttcgacaaggctgatgagtatcgtatgcccgcgatgattcttgccgacggtatgctcggtcagatgatggagcccgtcgagataggcgaaggcagcggcggctcgaatgtcgagaagccctgggcggcatgcggccacaacggcggacgcaagcataatatagtcaattctctttatctccaggcggcagacctcgagcgcctcgtcagagagcgtttcgcaagatatgcggttatcgaggaaaaagagcccatgagcgagagctacatggtcgatgatgccgattatgtcgtcgtcgcttacggcgcgtcggcgcgtgtcgcaaaggcagctgtccgcgaagcgagagagcagggcataaaggctggacttattcgcccgataaccctctggccgttcccgaagcaggctatgcgcgacgccgcagagcacgcaaaggcttttctctgcgtcgagatgagcatgggtcagatgatcgacgacgttaagctcgctatcgattgcagcagacccgttgaattcttcggacgcacgggcggaataattccgacccccgccgaagtccttgaaaatatcaaaaaacttgcaggaggcgaaaaataa

SEQ ID NO: 2080 - DNA, 258 bp, Unknown
  Unknown gut bacteria
atgcctaatatcaagtcagctaagaagcgtgtcatcgtcaacaagacaaaggccgcccgcaacaagtcccgcaattcagcccttaagactgccataaagaaggctcacactgctgctgagaccaacgcggcagataagaaggaagttgtcaccgcagctataaagaaggtcgatcaggcagccgccaagggccttattcataagaacaatgctgctcgcaagaagtccgctcttgcaaagcttctcaacgaggcgtaa

SEQ ID NO: 2081 - DNA, 1818 bp, Unknown
  Unknown gut bacteria
aagcgtatgcttcaggaagctgtcgatgctcttatcgacaacggccgccgcggcagacccgtaaccggtccgaacaacagagcgctcaagtcgctctccgatatgcttaaaggtaagcagggacgtttcagacagaacctgcgctgtaagcgtgttgcctattccggacgttcggttatcgtcgtcggtcccgagctgaagatttatcagtgcggtctgccgaccgagatggctcttgagctgttcaagcccttcgtcatgaagagacttgtccagaccggcaaggcgaacaacgtcaagtccgcaagaaagatggtcgagcgtcagaatcccgttgtctgggatgctctcgaagtggttatcaaggatcaccccgtgctcctcaaccgcgctcccacacttcacagactcggtatccaggctttcgagcccatccttgtcgagggcagagctataaagcttcatcccctcgtttgtaccgcattcaacgccgacttcgacggcgaccagatggcagttcacgttccgctttctgcggaggctcaggctgaggcgcgcttccttatgctcgccgccaacaacctcctcaagccctccgacggacgcccggtcaccgttcccacgcaggacatggtcctcggctcctattacctcacccttgaaaagcccggcgagcccggcgagggcaaggtgttcagagatgtcgatgaggccaccatggcttacgacgacggcaccatcggactccatgcgagaatcaaaatccgcatgactaaggagattgacggcaagcccgtcagaaagctcgtctccaccaccatgggacgcgttatcttcaacggacctatcccgcaggatctcggctttgttgacagaagcgatccggagaacgacttcaagcttgaggtcgatttcctcgtcaataaaaagaaactcggcgaaattatcgacagatgcatcaagattcacggcacctcgatagcagccgatatgcttgataagatcaaggctcagggctacaagtactcgacccgaagcggtatcaccgtcgctgtctgcgacgctaccataccgccgcgcaagggcgaactcattgccgacgccgagaaggacatcgccgagatcatggacaactatgagaacggtcttctctccgacgaggagcgcacgaacatggtcattgagacctgggaagactgcacaaagagagttgccgcagaactcaaggcgaacttcgatccctacaacccgatcaacatgatgcttgactccggtgcgcgaggcaacgacagccagctgcgtcagcttgcaggtatgcgcggacttatcgcgaatacagcaggtaagacgattgaaattcccatcagagccaactaccgtgaaggtcttaatatactcgaatacttcatctcgtcgcgtggtgcgcgtaaaggtcttgccgataccgcacttcgtaccgcggactcgggttacctcaccagacgtcttgtcgatgtctcgcaggatgttatcatccgcgaggaggactgcggctgcacagagggctcggatgtctacgatatcttcgacggaaagcgccgcatagtcagcctcaccgagcgtcttaccggccgctatctgctcaacgactttgtcgacgaggataccggcgagcttatcatgagcaaggataagatgatgagcgaggacgacgcaaagcgcgtcgccgacaaggtatacgagtaccatgacagaaaggtcgccgcgggcgaagagcccgagggcagccttgcaaagataaagattcgttcgctgcttacctgccagtccgagcacggc

SEQ ID NO: 2082 - DNA, 630 bp, Unknown
  Unknown gut bacteria
atggcaaacataacaataacaaatcacccgcttattcagcataagctgtctatcctcagagataagcacaccgcttccaaagagttccgtactcttgtcggcgagattgctatgctcatgtgctatgaggctacaagggaccttcctctcaaggatgttgagattgagactcccgtttccaagatgaccacaaaggctcttgcaggcaagaaacttgcttttgtcccgattctcagagccggtctcggtatggttgacggcgtcctgacccttgttccttccgccagagtcggtcacatcggtctttaccgcgatcccgcaaccctgcagcctgttgaatattattgcaagctgcccagcgatatcggcgagcgcgatgttattgttctcgatcccatgcttgccaccggtggctcagctatcgatgctataacccagatcaagaagagaaatcccaagtcaataaagttcatgtgcatcattgcagctcccgagggacttgaagctctcagcaaggctcatcccgacgtggatatcttcgccgctgcaaaggacgagaagctcaacgatcacggctatatcgttcccggtctcggcgatgccggcgacagaatcttcggcacgaaataa

SEQ ID NO: 2083 - DNA, 1302 bp, Unknown
  Unknown gut bacteria
atggcaaagtatttcagccctgaaattgagacagcgtcgcgcgattatctgcacgcaatacagagcgcaagactgataaaaaccgtaaaaagatgctatgagaacattccgttttacaaagcaaagtttgacgaaatgggtctcaagcctaaagatatccactcgatagacgatatcagcaagctgccctttacagtaaagcaggatctcagagatcactatccgttcggactttttgccgtgccgagagaggagcttgtcagagttcacgcctcgtccggaacgaccggaaagcagactgttgtcggctacacgagaggcgatatagaccgctggtcggagtgcgtggcaagagctcttaccgctgcgggcacaacgccctcggactacatccacgtctcctatggctacggacttttcacgggcggtatgggtattcattacggtgcggagaagctcggcgcaacggctattcccgtgtcctccggcaacacaaagcgtcaggtgcagattcttcaggatttcggctcaaatgtgctctgctgcactccgtcatacgctctgtttatcgcagagacactcaaagagatgaatgtcgatcctgccgagctaccgcttcgcataggcattttcggcgcagagccgtggagtgagaacatgcgcacccagcttgagaatatgctcaaaatcaaggcatatgatatatatggcctatccgagatagcgggtcccggcgttgcatttgaatgctgcgagcagagcggaatgcatatatgcgaggattatttctatcccgaaatagtcgatcccgtgaccctcaagccgctgcccgacggcgaatacggcgagctcgtgttcacatgtatcggcaaagaagctcttccgctgctcagatacagaacccgcgacatttccgcaataacgcatgagaaatgcgcctgcggcagaacgctcgtcaagatgctcagacccaagggcagaagcgacgatatgcttattatccgcggcgtcaatgttttcccggctcaggtcgagcatgttattctttcgctcggcatggatccgaactatcagataatagttgacagagcgaataatcttgatataatgaccgtctgcatcgagatgtcagaccacatgttctccgactcggtcaagcagattgaggctaaagaaaaagagatttgcggcgccatgcagtccgtcctcggtgtttccgcaaaggtgcgtcttgttgaaccgcactctctgccgcgctacgaaggcaaggcttcgagagttattgataacagaaaaatataa

SEQ ID NO: 2084 - DNA, 1287 bp, Unknown
  Unknown gut bacteria
atgccgagagaggtttcactggaaaagaccaggaatatcggaatcatggcgcatattgacgcaggcaaaaccaccacaacggagcgtatcctgttctacacaggaaagacccacaaactcggcgaagtgcatgatggtgctgcgacaatggactggatggagcaggagcaggggagaggtataacaatcacctccgctgcgactacctgcttctggaagaaccaccgaatcaacatcatcgacactcccggccacgtggacttcaccgttgaggttgagcgttctctgcgtgttctggacggttctgttaccgttctttccgcaaagggcggcgttgagccccagtccgaaaccgtctggagacaggcggacaagtaccaggttccgagaatggtctatgttaacaagatggacattatgggagctaacttctataatgttatagacatgatgaaggagcgcctgaagtgtaacgcagttccgattcagctccccataggcgcggaagctgacttcaagggaatcatcgaccttgttcagatgcaggctgatgtctactatgatgacaagggtctcgacgttagagtcgaggagatccccgagaacatgaaggaacttgcacagaagtatcatgatgagctcgttgagcacgtcgccgaacaggacgacgagctgctcgagaagtatctcggcggcgaggagctcaccattgatgagataaagacctgcatccgcaagtctactatcgccaataagatggttcccgtatgctgcggtacttcttaccgcaacaagggtgttcagcagctgcttgacgctattgttgattacatgcccgctccgacggatgtcccgtcgataaagggcacgaaccccgagaccggtgaagaggagttccgtcattcttcggattccgagccgttcgcagctcttgctttcaagatcgcgaccgatcccttcgtcggtaagctctgcttcttcagagtttattcgggcacagtcaccaccggcagcactgtttacaatgctaccaaggactgcaacgagcgtctgggaagaatcctgcagatgcactccaaccacagaaaggatatcgactgcgtttacgccggagatatcgctgctactataggtcttaagaacaccaccaccggcgacacgctctgcgacgccaaggctccgataatccttgagtccatggagttccccgatcccgttatcagggtcgctatcgagcccaagaccaaggcaggccaggagaagatggctatcgcgcttgcaaagctc

SEQ ID NO: 2085 - DNA, 1548 bp, Unknown
  Unknown gut bacteria
atgaaagttctgacttcatcgcagatgttctctgcggagcaggcgcaggtcaacaggggaatgagctttacgcgccttatggaaaacgccggcagcgcttgcgcaagggagataagagagcgctttgcctctcttgagcagtcgcgcggacttgtgtgcgtgctctgcggaaagggcaagaacggcggcgacggctttgttatcgcacgcaagcttgcacttgcgggctttaatgtcgccgttacggaggctttcggcgagcctaccgccgaggactcgatactcatgcgcgaaaaggctgtcgaaacagggctcgttccggagttcttctggggagaggaaaacgctaaaaattcaattgaatctgctgctgtgatagtcgatgctgtgttcggcacgggttataaatacagagaggacgagcgggtgagagcggtctttgaggctgccaacgcttcgcctgcaaaagtcgtttcaatcgatgtcccgagcggactcgagagcaacaacggcgatgtgccgggcagctgcataaaagcggatatcacaatagccgtgtcgtgcatgaagcccgtccacatattaaaacccgcgcgcgtgctctgcggcgaaataataaccgtcgcaataggcatcgacgacgatattatcgacggcattgaggacgataccctagccgtgctcactcccgcccaggcgaaaaagatattcccgcgccgtgaccttatggcgaataaaggcacattcgggcgcgctctgagtatctgcggcagccgcaatatgcagggtgcggcggtgcttgccgccttgtcggcgcttagatgcggagcgggtcttgtaactgctgcatttcctgatgccgcatataacgcaatagctccgaaactcaccgaatcattgcttctgcccctgccgtcaaacgaggcgggaactttctcgtccggcgcgatacccgcgctgctcgagcaggctgaaaaatcctcggctgtgctcacgggatgcggtctcggactcaatctccatacgaaagagcttgtctcggcgctcgtgcagaactgcacaaagcctatgattatagacgccgacggcataaatgcgctcgccgcaaatatagatatactgaaaaatatcaaagctcccgttatcctcactccgcaccccggcgagatgtcccgccttaccggcatgagtatcgccgatatcgagcgcgaccgggtgaatgtcgcccgccgcttcgccgatgaatacggcgttgtgctcctgctcaagggcgcgagcacggtaatagccggcgcgggcaggcgtgacgcgtatatcaacgtcaccggcaatcagggtatggcaaagggcggcagcggagatatgctctcgggcatcattctcgcgctcctcgctcagggcgtgtatccgtttgacgcggcggtgctcggcgcatatatccacggtgccgccggagatgccgcggcgtgcgaactgtcgctctcgtcgatgctcgcctccgactgcatagccgctctgccgcgtgtgctgcgaaccctggagaggtaa

SEQ ID NO: 2086 - DNA, 495 bp, Unknown
  Unknown gut bacteria
atgcctaaaagaagcgattatatctcgtgggacgagtattttatggggatcgcgatgctctcggcttgcaggagcaaggatccgaacacccaggtgggcgcctgcatcgtaaacgacagaaacaggataatgtccgtcggttataacggcttcccctccggctgcgacgatgacgagttcccgtgggagcgcgagggcagcgcgtttaacacaaaatacgcctatgtctgccacgcagagctcaatgcgatattgaacgccagcggcgacctgcgcggatgcaaggtctatgtcgcgcttttcccctgcaacgaatgcgccaaggcgataatccagagcgggataaaagaggtcgtctatatcagcgacaagtaccgcaacaccgacagcgtacgcgcatcgaaaagaatgttcgacgccgcgggagtgaaatacacgaagctcgagatgaagcgcgacaagctcgttatcgacttcagcgaaaactcaatataa

SEQ ID NO: 2087 - DNA, 534 bp, Unknown
  Unknown gut bacteria
atggaggtgctggttataggtatcaaagaaatgcagatcaatgaagagatcacggacaaagaggtcaggctcataagcaatgacggtgaacagttaggtatcgtttccgccgctcaggctcagaagcttgccgcagagaaaaatctcgaccttgtcaagatagctccgcaggcaaagccgcccgtctgtaagatcatggactacggcaaatatcgttttgagcagtccaagagggagaaggaagcgaagaagaatcagcgtgtgatcgagataaaggagatccgcctttcgcccaacattgacgtacatgattttgatacgaaagtcggtcacgccagaaagttcctgtcggcaggcaacaagaccaaggtctcgatccgcttccgtggacgcgagatgacccacaccgatctcggactgaccataatggctcagtttgcggagaagtgcgcggatatcgcctcggtcgagaagccggcgaagcttgagggacgccagatgctcatgttcctcgctcccaagagcgcaaagtga

SEQ ID NO: 2088 - DNA, 840 bp, Unknown
  Unknown gut bacteria
atgaaatttccaataggcgttattattgacagcttccgcacggatatcccgacggcggtcaaaaaggctgccaaggtcggtgcgcagggcatccaggtctatgccaccagcggagaaatgtcgcccgaggagcttgtcggctccaagcgcacggatttccgcaagctcgttgaggacaacggactcgttatctccgctctctgcggcgatctcggcggcggcttcggcaacaaagaggagaacccctggagagtcgagaagtcaaagagaataatcgagcttgcaaaggagctcggcacggatatcgtcacgacacacatcggcgttgttcccgaggacagcggacacgatcgatacaagataatgcaggatgcgtgctttgagctctcccgcttcgcggacagcctcgacgcgcactttgccatcgagacgggtcccgagacttcggcgacgctcaagaagtttcttgactcgcttggctctaccggcgtcgcagtcaacctcgaccccgctaaccttgttatggtcacgggcgacgaccccgcaaaggcggtctacaacctgcgcgactacatagtccacacccacgcaaaagacggcgttcagatattctacagggatcccgagatagtttacggcataaaaaaagacccgctcgtcacaggcagctcgtttaaagaagtgccgctcggcgagggcagcgtcaagtgggacgaatatctcgccgcgctcaatgatatcggctacaagggcttcctgacgatagagcgcgaagtcggcgacgaccccgaaaaggatatcggcaacgccgtaaacttcctcaaaggatacatggactga

SEQ ID NO: 2089 - DNA, 639 bp, Unknown
  Unknown gut bacteria
aaagccctatactattattgtattttcaccgaacttttctttagggggaacgaggatttgaagctgcttgaggagcgcataattgctgacggcaaagtgatcggggacgatattctcaaggtggatatgtttctcaatcaccagatcgacgtgcaccttcttcaggagatcggcaaggagttcaagcgccgttttgacgggtgtaatataaataaaattctgactatcgaagcatcgggcatagggatcgcgtgcataactgcgcaatatttctctgtgcctgttgtttttgccaaaaagggcgcgcacaaaaatgtgggcagcaatgtctactcctccgttgtccactccttcacaaagggcacggacagccttgttacagtgtcgaaagactacataaacaagggcgacaagatactcatcatcgacgatttccttgcaaacggcgccgccgtttcggggcttatcgatataatcaaccaggcgggtgccgagcttgagggcgtcggcatcgccattgaaaaaggcttccagcccggcagaaaggttctcgaagagaagggcgcgagagtcgaatctctcgccatcatcgagaagatgggcaacggaacaataacattcaaagaacaggacgactga

SEQ ID NO: 2090 - DNA, 978 bp, Unknown
  Unknown gut bacteria
atgataatcacattcattcagcgtgctataatgcagagcattcctctgctcttcggctcaacgggcgagacgataaccgaaaagggcggcaacctgaacctcggtatccccggcatcatgtatgtcggcggcatctccggcgttatcggcgcgttcttctatgagaggagcgtcgagacggtgaacccgttcctcgcagtgctcattcccctgctctcgagcattttgggctcggcgctcatgggtctgctctactgcttcctgaccgtcactctgcgtgcgaaccagaacgtcactggccttgcgatgacaactttcggcgtcggcttcggcaacttcttcggcggctcgctgataaagataaccggcagcgacatcccctcgatagcgctgagcgcaacgagcaactgcttcaagacaacgctcccgttcgccgcaaagctcggaaaggtcggagatatattcttctcctacagcttcctcgcttacgccgcgataatcatcgcgctcatcaccgcctatttcttcaagcacacgcgcacaggacttcagctgcgcgcggtcggcgagaatcccgcaacaagtgacgcggcgggcatcaacgtcggcagatacaaatatgtctcgacaatcgtcggcagcgttatagcgggtctcggcggtctctactacgtcatggactacgcgaacggcgtctggtcgaacaacggcttcggcgaccgcggctggcttgcaatcgcgctcgttatcttcgccgtctggaagcccgatctcggcatcctcggctcgttcctcttcggcggtctcatggtcgttcacaactacatcccgaacctcagcttcggcgcgcaggaactgttcatgatgactccctatgttgttacgataatcgtccttgtcgcggtcagcatgcgccgcaagcgcgagaatctgccgcccgcgagcctcggactttcttacttccgagaggatcgataa

SEQ ID NO: 2091 - DNA, 606 bp, Unknown
  Unknown gut bacteria
atgaaagagaataagaaacttgtcaacgaaataatcagcgatgtcaagcacgacatgagcaacgaggatatcatatccctgctcgccgacagcaggatatctgcaaaccccgacaaggagaaatatacattcggtcagcgcgccgcggataaaatcgcgaagttcgccggcagctgggcattcatattctcgttctccgccctgctgatactctggatggtcggcaatgtcatactagcaaaacgcgcgttcgacccctatccgttcatactgctcaacttagtgctctcgtgcgttgccgcgctgcaggctccgctgataatgatgagccagaaccgtcaggaggaaaaagaccgccgtcgcgccgagaacgactacaaagtcaatctcaaaaccgagataatgatcgaagatatccacggcaagatgaaccgtatactcgcccgtcaggcaatactgatgaagctgatgaagatagacgaaaacacaatgaagcagataacgctcgaaaagcaggaggagatgtgcgccgaggcgtgcagagccgagaagatcaaaaacgagcacagcgagcataaagaacccgaagaaaagcccgaaagctga

SEQ ID NO: 2092 - DNA, 2577 bp, Unknown
  Unknown gut bacteria
atgaacactcagaactatactcagaagaccgttgaggcaatacagaacgcgcagaacatagcaagagagaacgacaaccagtcgctcgtcccagaacatctgctctactctctgcttgatcaggacggcgggctcatcccatccctgttcggcaagatgggcgttgactgcaacaccgttctcggcgagcttgattcttatattgctactctcccgaaggtttccggcggcgagatgtatctctcttcggagaccgaccgcgttatccgcaccgccgaaaagacggcaaagagcatgaacgacgaatatgtttcggttgagcatcttatgctcggcatattcacgaacatgactcctgaaatcagaaagatattcaatgcccacagcataaccaagaacgcttttgtcgatgagctttcaaaggtcaagacaagcccggtaaccagtgacaaccccgaagatacttacgacgcactttcgaaatacggcaccgaccttgtcaagcgtgcgcgcgaaaacgagcttgatcccgttatcggccgtgacactgagataagaaatgtcattcgtattctttcgagaaaaaccaagaacaaccccgtgcttatcggcgagcccggcgtcggcaagaccgctatcgccgagggtctcgcgcagagaatagtacgcggcgatgtgcccgagggacttaaagacaagactgttttcagccttgatatgggttcgcttatcgccggcgcaaagtaccgcggcgagtttgaagagagactcaaggctgtgctcgaagagataaagaaatccgagggcaagatactgctcttcatcgatgagctgcacacaatagtcggcgcaggcaagaccgagggcagcatggacgcaggcaaccttttgaagcccatgcttgcacggggcgagctgcactgcctcggcgcgactacgctcgacgaataccgcaaatatattgaaaaagacgctgcgcttgagcgtcgtttccagcccgttatggtgaacgagcccactgtcgaagacacgatttcgatactcagaggactcaaggagcgctatgaagtttatcacggcgttcgcatacacgacagtgcacttgtcgccgccgctaccctttcagacagatatattaccgaccgtttcctgcccgacaaggcaatcgaccttgtcgatgaggcgtgtgcttccatccgcaccgagatcgactcaatgccttctgagcttgacgatgtacgccgcaagataatgcagcttgaaatcgaagagatggctctgaaaaaggaaacggataagctctccaaggagcgtcttgagaagctcggcgccgagctcgccgaatacaaagacaagttcaatgagatgaagtcgcgctgggaagctgaaaagcagagcgttgacgaggtcaagaagctcaagtcggaaatcgagcagactcacgcagatattgagcaggctcagcttcactacgaatacgaaaaagcggcaaaactcaaatattacgatctgccctctcttgaaaagcgtctcgcagaagccgaaaagaagagcgagcagcgcaccgaaaacacccttgtccacgacaccgtgaccgaggaagagatagcgaccatagtcgcaaaatggaccggtatacccgttgcaaagctcatggagggcgagcgtgagaagctgctccacctcgatgacgttattcatcagcgcgttgtcggtcaggacgaggcagttcagaaggtcacagaggctgtcctccgctcccgtgcaggcatctccgaccccaacaagcctatcggcagcttcctgttcttgggtcccaccggtgttggcaagacggagcttgcaaaggctcttgccgattgtctgtttgatgacgagcacaacatggttcgtattgatatgaccgaatacatggagaaatactcagtctcccgtcttatcggagcgccgcccggatatgtcggatacgatgagggcggtcagcttactgaggcggtacgccgtaaaccctattccgtcgtgctgttcgacgagattgaaaaggcacacccggatgtattcaacatcctgcttcaggtgctcgacgacggccgtataaccgacagccaaggacgcaccgtggacttcaagaacacgataattatccttacatcgaacctcggtagccagtatctgctcgacggcatcgacgagaacggcaacatctctgaagaggctcgcgagggcgtcatgaatgagctgcgccgcagcttccgccccgaattcctcaaccgtcttgacgagacgatattcttccgcccgttgacgaaagacaacctcaaaggtatcatcgacatcatgctcgattcccttaaaaagcgtcttgcggacaagagcctcggactcgaggttaccgatgccgccaaggagctcatcatcgaccgcggattcgatcccgtttacggcgcaagaccgcttcgcagatatctgcagagcagccttgagaccctcgtcgcgagaaaaattctctccggcgaccttgacgcggattcgaccataaccgttgatgttgaaaacggcgagctcgtctgcaaataa

SEQ ID NO: 2093 - DNA, 2001 bp, Unknown
  Unknown gut bacteria
atcaagaaccgcatcgtgctcacgagcatgggcggcaccgacctcttcggatggatggagaagaaccacttcgataaagacggcgcacgctttatcatggaagtcgcgaagaacaacgcgggtcttgttctccccggatgtcagccggtctacaaccccatgttcggccagtggctccacaagaacaagaagatgtatgccgacctcaaaaagtggactcccgagctccacaagaccggcgcgaagctcttcgttcagctgaccgcaggcttcggccgctccttcaccatcagcgaaatgatggagaagctctacaccaaccccgcgctgagagtcctcagcaagcccttcatgtatctcgacaagatcacggcttccgcgagcccctcgcccaaccgctggtctgataaagttccctcgagagagatgaccaaggctgaaatcaaggagtttgtcaatgcgttcgcagagagcgcaaagatgctcaaggacgcaggcgttgacggcgttgaggttcacgcagtccacgagggctatctgctcgaccagttcacccttaaatatgtcaacaagcgcaccgacgaatacggcggctcgtttgagaatcgttaccgcttcgcggtcgaggtagttcaggctatcaagaaagcctgcggcgacgacttcccggtctccctgcgctacagcataatttccaagaccaagggcttccgtcagggtgctctcccgggcgaggcttataccgaggtcggacgcgacatggcagagtccgagaaggctgtcaagtatcttcaggatgccggttatgactgcctcaactgcgacaacggcacatacgacgcatggtactgggctcacccgcccatctacatgcccgagaactgcaacctcgaggatgttgaatacatcaagcagttctgcgacattcccgttatctgcgccggccgcctcgatccgagagttgccgcggacgcgataaaggaaggcaagcttgacggcgcaggattcgcgcgtcagttcctcgccgatcaggagtgggtcacgaagatgatgaatgatgaggaggatgacatccgtccctgcattctctgccacaacggctgcttcaacatgtgccactacaagggcgtgcccaacgaccaggagctttccgacagcctgcatctttcccgctgcgctatcaatgccgagacgatgcagtggaacaagcactacataaagaagaccaactcgcccaagaccgtccacatcgtcggcggcggcatcggcggcatggaggctgcccgcgtgctcaagctccgcggacacaatccgataatccacgagaagagcgacgtgctcggcggaacattcatccccgcgagcgcagagtcctacaagggcaagctccgcgacctgcttgactggtacagacgccagatgacgaagctcggcatcgaagtcagactcaacgacgagataaaggatatcgcggcgttcggcagcaatcccgttatcatcgcgaccggctcgactccgagacttctcagaagagttcccggctatgagaagatgatcgagggctgcgactacctcaacggcgcagaagtcggcaatacagtcgctgtcatcggcggcggactgaccggatgcgaaatagcctacgagctcgctctccagggcaagaatccgatcattgtcgagatgaaggacgatcttatcagccagaccggcgtctgccttgcaaactcctcttatctcagagagtggtttgccctgcacaagactcccgtctatcttgagacgacactcaaggaagtcaaggacggctctatcgtctgcaccggcaaggacggcaaggacatcaacatcgactgtgactccgtcatcagctgcgcgggctatatccccgctccgcttgccgagaagtccggcaacgtccacctcgtcggcgactgccttgcaataggcaacctccgctccgtcgtgtggcgcgcatatgatgttgcgatgaagatctga

SEQ ID NO: 2094 - DNA, 354 bp, Unknown
  Unknown gut bacteria
atgacccccagagaactgacaaacgaaatagttaaaatactcgacaagaaaaaggcgctggacatcacggcgataaagaccgaggagctgacgatagtctccgactacttcgttattgcgaccggtacctctaacacccacgtcaagagcctcgcagacgatctcgaatacgagttgggcaagctcggcgcagcacccgagcacattgagggacgcgcgaccggctggattctgctcgacttcggcagcgtgctcgtccacctgttccagaaggatcagcgcgaatactacaacctcgagcgtctttggaacgacgcgcagcagcttgacataagcgacctgctgaccgactga

SEQ ID NO: 2095 - DNA, 2757 bp, Unknown
  Unknown gut bacteria
atgggtcttttaaagaaaattttcggagactactcttcgagagaaatcaagcgtatcacgccgataaaggacaaggtgctcgcgcttgacgaggaatattcaaaactcaccgatgaggagctcaaagcaaaaaccccttatttcaaggagcgcctcgccaacggcgagacccttgacgatatcctgcccgaggcgttcgccgcctgccgcgaggcttcgtggcgtgtgctcgggatgaagcacttccccgtgcagattctcggcggtatcgttctgcatcagggacgcatcgcggagatgaagaccggcgagggcaaaacgctcgtcgcaacgctccccgcttatctcaacgcgctctccggcaacggagtccacatcgtcacggtcaacgactacctcgcacgccgcgacagcgagtggatgggcaaggtctaccgcttcctcgggctcaaggtcggtctgataatccatgagaagaacaacgacgagcgccgtgaggcatatgccgccgacataacctacggcacgaacaacgagatcggctttgactatctgcgtgacaacatggtgccctacaaagagctcaaggttcagcgcggccactcctttgcaatagtcgacgaggtcgactcgatacttatcgatgaggcgagaacgcctcttatcatatccggccgcggcgaccgctcgaccgacctctacaagcaggcgaactccttcgcccgcacgctcaatttcgagcgcataaaagagcttcgctcctcttcgagactcgaagataccgccgaccaggtcagcgaaaactgcgacgtcatagttgacgaaaaggcgagaaccgccgtgctgacccagaaaggtattgcaaaggcggagaagtatttcaatctcgacaacctcatggatcccgcgaacatgaccatacagcaccacatcaaccaggcaataaaggcgataggcgtcatgcgccgcgatgtcgactacgtcgtaaaggacggccaggtgctcatagtcgacgagttcaccggacgcatcatgctcggcagacgctacaatgagggtctgcaccaggctatcgaagcaaaagagggcgtaaacgtcgagcacgagagcaagacgctcgcgaccattacattccagaactacttcagactctatgacaagctctccggtatgaccggtaccgcaatgaccgagagcgaggagttccaggagctatattcgcttgacgtagtggagagcccgacgaacaagccgatgataagaaaggacatggacgacctcgtctacaagaccgagcccgcgaagttcaacgcagtcatcgacgacattgtcgagcgccacgaaaagggtcagcccgtgcttgtcggcacgatatccatcgagaagtccgagacgctcagtaagctcctcaaaaagcgcggcatcaaacatgaagtgctcaacgccaagtaccatgaaaaggaagcggagatcgtcgcgcaggcaggtaagctcggcgcggtcacgatagccacgaacatggcaggacgcggaaccgatatcatgctcggcggtaacgcagagttccttgcgaagtccgagatgcgccgcaagggctacagcgaagagcttatagccgaatcgaccggcttcggcgacacggacaacgaggatataatcagcgcgagagaggaattccaggctctcgagaagaaatataagaatgaaatctccggcgaggcggagcaggtaagacaggcgggcggcctctgcatcataggcacagagcgccacgagtcccgccgtatcgacaaccagctgcgcggacgttccggccgtcagggcgaccccggtgttagccgcttctacctgtcgcttgaggatgatctgatgcgcctgttcggcggcgagcgcgtgacaactataatgaacacgctcagaacccccgaggatatgccgatagagtcgaagatgatctcgaatgttatcgagagctcgcagaagcgcgtcgagtcgcgcaacttctcggtgcgtaagagcgtcctgagcttcgacgatgtcatgaaccgccagcgtgagcttatctacaagcagcgcgaccaggtgctcgacggcgagaacctcaagcccgttatactcaagatgctcgacgagtgcatcgccgagtccatagatttctattgcccgaaggcgctctcccactccgactggaacatagccggactgcgtgagaagttcctcggctggctgaccactcctgaagacttcgcggacggctttgaccgcgaggacgcaaaggaagagctcattgagcgcggacataagctttacgacgagcgcgaggagctcatgggcgtcgacgagaacggcgtgccgataatgcgagctctcgagcgcatggttctgctcaagatggttgacagcaagtggatggatcacattgacgccatggaagagctcaagcgcggcataggactccgctcctacggtcagcaggatcccgtcgttgcgttcagacaggagagctatgatatcttcgacgagatgaccatgtctatccgcgaggataccgtccgcctgatgatgaccatcatgcccaagaacgaggaggacaccaagcgcaagcaggtcgccgagataacctcgaccagcggcgcgtccgacggcagcgaaaaggggcgcaccgtccgcaagggcgcaaagataggcccgaacgatccctgcccctgcggcagcggcaagaagtacaagaagtgctgcggcgcggtgaacaagtaa

SEQ ID NO: 2096 - DNA, 648 bp, Unknown
  Unknown gut bacteria
atggattttctcggcgtcaacgctcagctgctcgggggctttaaatatacgctgttgatattttttataaccctcgttgcggccataccgctcggcctgccgatagctctcggttcgatgagccgtttcaagcccctgcgctggatcagccgcgcttttgtgtgggtaatccgcggaacgccgctgatgctccagattatggtcgtcttttatgttcccggtcttgtgttcggcacgccgttcagatcgcgcataatcgctgttatcatagcgttcataatcaactatgcggcgtatttttcggagatataccgcggcggcatagagagtatcccggtcggtcagtatgaggcgggtcaggtgctcggactcacgaagacccagaccttcttcaaagtagtgctgttccaggtcgtcaagcgtatcatggcaccgatgagcaacgaggtaattacgctcgtcaaggatacttcactcgcgaatgttatcgcagtcggcgagcttattatgtcggctcagaatatcgttaaagtctacgccataatctggccgctgttctataccgcgatattctacctcatcttctgcggagttctcactctgctgttcaatgcgctcgaaaagaaacttaactattacagaggttga

SEQ ID NO: 2097 - DNA, 246 bp, Unknown
  Unknown gut bacteria
atggcagttaaaatcagacttcgccgcatgggcgcaaagaagaaccccttctacagaatagtcgttgcagattcgagatatccccgcgacggcagattcattgaggagattggcacctatgatccgctcaagactcccgctgatgtgaagatcgacgcagacaaggcaaagcagtggatcgccaacggcgctcagcccaccgataccgttaaggatatcctcaagaagagcggcgtcatcgactga

SEQ ID NO: 2098 - DNA, 651 bp, Unknown
  Unknown gut bacteria
atgttccgttatgcaatttttgattttgacggcacgcttgccgatacgggtgcgggcgtgtttgcctccgtgcagtatgccctgcgcagcatgggcgagccggagcttgacagcgagacgctgaaatattttataggtcctccgctcgagacgagcttttccgtcaagtgcggactcgacagcgaacgctgtcacgaggcggtcgaaaaataccgcgaatactattcgacaaaaggtatatatgaacttgaattcttcccgagcacgctttcgaccctgcgcgaattgaaagcggcgggagtgaaaacggctgtcggctcttcaaagccggagctttttataaatcgtattctcgagcatttcgggatatccgacctgttcgacttcgtctccggcgcaacattcggcgagccgcacgcggacaaaacagttataatctcccgcgctgtcaacggactcggagtggagaatctcgcggatgccgttatggtcggtgacaggagctttgatatagacggcgcgcacggcgtcggactcaaatgcatcggcgtgctcgagggcggctacggtgacgagaatgaattcaaaacggcaggagccgactggatagtcgatactcttgccgatgtgaaagatataatattaaaatga

SEQ ID NO: 2099 - DNA, 1257 bp, Unknown
  Unknown gut bacteria
atgacaaaacgcaacatctttaaacgcgcggcaagcctgctgctcgctctgattatcgttttcagcgcgggcgtttcccttgcatttgccgacgcaaaggccgattcttacaaatatccctgcatcttcgtccacggcatcctcggctacggagacaacgacaagctcaactccgtcacgccatactggggtatgcagtataaagaggatctgatgaagtcgctcaatgcccgcggatacgattgccacgcggcctccgtcggtccgctcagcagcgcatgggacagagcgtgcgagctctatgctcagcttgcgggaaccgtcgtcgattacggtgcagcccactctgcggagcatcatcatgagcgctacggccgttcgtttgtcggcaaagctcttatcgacaccttcggcaagaccgacaagaacggaaatatcatcaagataaatctcttcggccactcgttcggcggcgcaacgacgagactcttcacctatattctcgcaaacggcgcgcccgaagaggtcgcggcgggcggcgacgtctccgagttcttcaaaggcggaaagggcgattatgtaaactccgttatctcgatagcggcgccgcataacggcacagtcagcgggaatgtcggcattgccgtttatcacggcgagtatatcgccgctatgattgccaatgtcgcgggtatggcgggcagcaactaccttgacctcaagctcgatcagttcggtctgacccgcgctcccggcgagggcaaggcgagcttcaatctctgtggcattctgaactatgccctctcgaacgataactgcctctatgacctcacgcttcacggcgcgcaggagctcaacgccaagataggcgctgttgagaacgtatattatttctcctacgcctgctgcggcacggagccttcggcggacggcagattccagaacccgaccgatgcgctcggcagcatggcgggcacgggctggcttataggccacatagccggaataacggttgacggcgtcaagctcgagggcgattggctcagaaacgacggcgcagtgcccgtcaagagcgcactctatcccgagggcgagaagcacgaatttatcgttgaccacaagggcgcatatgagcgcggcgtgtggtatgtctatcctgttgtggagaacgcgaaccacagcactctgctcggctcgaagacagagagctatatcgacctctatatgaaccagatcgatatcgtcaacgcgaagtaa

SEQ ID NO: 2100 - DNA, 936 bp, Unknown
  Unknown gut bacteria
atgaaaggagtcctcagaatgagacagtcactcacagtcagaagagccgagcacttcggcataaacaggaagataatcgcaaacatgaccgcgcagagctggcacgacattccccatgtcgttgttacaaacgagcctgaggcgtccgaatttctgaaagttttcaaagaaatcaacgaagggtgcgcaaaagaagataagatcacgctcaacgcagttatattaaaagtaataacagaggcgctcaagaagtgccccgcgatgaatgcacatatcgatttcaaaccccgccttgtccgcggatgcgtgacggagttcgacgaaataaatatctcgatgcccatgcttctcgactcaggtgagatgatgacagtaaatctgcacaacatgcaggacaagaacctcagggatatcagagatacgctcgccgatgttcaacgcagagcgaaaaattcaaacatgtcgcaggtcatgtacgacgtctcgctcaacgacacgctgcaggggcttgtaaaaggcaaattggttcagacgatatcccgcctcatcggctcaaagaccggaaagtacaaagtaaaaaccctctccggcaagagcaagaaagaatattatgatatacccgagtacgacaggctcacaaaatacgacattgagcagggcacgataaccgtatcgaacctcggttcgctctacaaggactgggacggcatctgcgcactgcttgagataataccgccgcaggtcgccgcgataggcgtcggcgctccgcgcgacacggcgattgcaaacccggacggcacggtaacggtcggcaagaagctcgtcttcaccgtcgttttcgaccaccgtgcgctcgacatgggcgatgtagtccccttcctgaagtctattgacgagactttcaagaacccggaagttatcaaggagtgggtataa

SEQ ID NO: 2101 - DNA, 531 bp, Unknown
  Unknown gut bacteria
atgaagctgaatctgagagaaatcatagaaattcccggcggcagtgttccgtttgcgcaggagctggacacggccctgctcgactttccctccgtccgggcctacaccgcgccgatcacggccgagggcaaggtggtcaatacggccggcatcctcacgctgcagggcaaactgcacgcgcagatgctgtgtgtgtgcgaccgctgcggcgcggagtttccgcgcacggtcgacctcgacctgcacgccgacatcacggcggatgcgcaggacgacgatcctgaggtgtttacgctcgacggagactggctcgatgtggacgaggtgctctccaccagcttcatcctcagcatggataccaagtgcctgtgcaagcccgactgtgccggactgtgcgaccgctgcggcgcgaacctgaacctcgggccgtgccggtgtcaaaaaccccgcgatccaagaatggctgtattagagcagcttttggataataaaactgacgaagaagaggaagctgctcataacagcgactga

SEQ ID NO: 2102 - DNA, 1779 bp, Unknown
  Unknown gut bacteria
atgaaattgagcggaaccattacaaaagtttccggtccgctggtcgtggccaatggccttgccgatgccaacgtctccgacgttgtgcgtgtcggcgagcagcgcctgatcggcgagatcctgaatatgaccggcgacagcgcgtccatccaggtctatgaggagacctcgggccttggccccggcgcgaaggtcgagaccaccggtatgccgctgtccgtggagcttggccccggcatgctggagaatatctatgacggtatccagcgcccgctgcccgagatccgcgacctgaccggctccaacatcacccgcggcgtcgaggtgcccgcgctcaaccgcgagcgcgtctggcactttgaccccgttgtgcagcccggcaccgccgtcaccggcggcgacgtgatcggcaccgtccaggagacgacggccatcctgcacaagatcatggtgcccccgcagatgaagggcacgatcaagagcatcaccggcggcgacttcacggtcgaccagaccgtcgctgtgctcacggacgccaacggcgtcgaccatgagctgaacatgatccagcgctggccggtgcgtatcgcgcgcccctatgcgcagaagttcgctccgaacaagcccatgaatagcggccagcgtatcatcgacacgctcttcccgatcgccaagggcggcacggccgccgtgcccggcccgttcggcagcggcaagaccgtcgtgcagcaccagctcgccaagtggtcggacgtggacgtcgtcgtctacatcggctgcggcgaacgcggcaacgagatgaccgacgttctcatggagttcccggagctgaccgacccgcgcaacggcgagccgctgatgaagcgcaccgtgctcattgccaacacctccgatatgcccgtggcagcgcgtgaggcgtccatctataccggcatcaccatcgccgagtacttccgtgacatgggctatgacgtcgccgttctggctgactccacctcccgctgggccgaggccctgcgtgagatgtccggccgtctggaagagatgcccggcgaagaaggctacccggcctacctcgcgtcccgcatcgcgcagttctacgagcgcgccggctgcatccgctgcatcggcagcgagggcgaccgccgcggctccgtcaccgccatcggcgctgtctcgcctccgggcggcgacatttccgagccggtctcgcaggccaccatgcgtatcgtcaaggtgttctgggcgctcgattcgagcctggcgtatgcccgccacttcccggccatcaactggctgacgtcttactcgctgtatgtcgactcgctcaagccgtggtatgaggccacgttcggcgaggaatatatggccaaccgcgacaaggccatgagcatcctgcagcaggaatccgacatgcaggagatcgtccgcctcgtcggccaggacgcgctgtccccggctgaccgcctgacgatggagacggccaagatgatccgtgagggcttcctgcagcagaacgccttcgtcgacatcgacagctactccgagtaccgccgtcagtttctgctgctcggtctcatcctgcgctacgacgccgagtgccgcgacgcactcgagaagaacgcaccgatgcacaagctctttgccatccctgcccgcgtcgacatcggccgcgccaagagcgtgccgagcgacgagtacgagcaggtctatgccaagatcgccgcggacatgaccgcgcagatcaaagagattatcgccggaggtgaggagcagtga

SEQ ID NO: 2103 - DNA, 951 bp, Unknown
  Unknown gut bacteria
atgattgaaattgaaaagccgcgcatcgaatgccaggaatccccggacgatatctcgtatggcaagttcgtcgttgagcctttggagcgtggctacggcacgaccctgggtaactctctgcgcagagtgctgctctcttcactgcccggcactgccccgacgtccatccggatcgccggcgtgcagcacgagttttcgacgatccccggtgtcaaggaagacgtcacggagatcgtgctgaatgtgaaggagatcatcgcgcgcctgcactgcgacggcccgaagaccgtctatatcgaagcggcaggcgagtgtgaagtcacggccggcgacatcaaggcagacggcgaggtcgagatcctcaaccccgagctgcacattgccagcctcggcccggacggcgcgctctccatggagatcacgctcgcccacggcagaggctacgtcccggcggacaagaacaagagtgcgcagcaggtcatcggcaccatcccggtggacagcatctatgcgccggtcctgaaggtcaactacgctgtcgagaacacccgtgtgggcaaccagacggacttcgacaagctgaccatcgaggtctggaccgacaagaccatctcggcgcgcgacgcgctgagcctcggcgccaagatcctgtgcgatcacttcacgctcttcaccgatctgtctgacacgattggcaacagctgcacggtggtggagaaagagccggagcgccccgacaccgtcatgaaaatgacgatcgaggaactggatctctccgtgcgcagcttcaactgcctgaagcgcgcgaatatcaacaccgtcgaagacctcacgaacaagactgaggaagagatgatcaaggtgcgcaaccttggccgcaaatccctggaagaggtcgagcacaagctcgctatgatgggcctgagcctggcgagcgacgacaaccagtaa

SEQ ID NO: 2104 - DNA, 3432 bp, Unknown
  Unknown gut bacteria
gtgtcagaaaaggttttcaacaaggtccttgccgccaaccgcggcgagatcgcggtgcgtatcttccgcgcgtgctatgacctcggcatccacaccgtggccatgtactccaaggaagacgaactgagtctgttccgcacccgcgccgacgaggcgtatctcgtcggtgaaaacaagagccctctgggtgcgtatctcgacatccccgagatcatcgacctggccaagcgccgcggcgtcgacgccatccacccgggctacggtttcctgtccgaaaacgcggactttgcccgcgcctgtgaagaggccggcatcacgttcatcgggcctccgagcgacgtgctcggcaaaatgggcgacaagctctcggccaagcagatcgccatggaatgcggcgtgccggtcatccccggctgctccgagcccctgcgcgacgggcaggaggcactcgagaaggccatcagcttcggcttccccgtcatcctcaaggcggcagccggcggcggcggccgcggcatgcgcctgtgcgagatgcccgaggacgtcatccccgcgttcgagctcgtcaagaacgaggcgcgcaaggccttcggcaatgacgacatcttcatcgagaaatacctcgtgcagcccaagcacatcgaggtgcagatcctcgccgaccagtacggcaacgtgcgccacctcggcgagcgtgactgctcgctgcagcgccgctaccagaaggtcgtggagtttgcgcccgcgtggagcgtgcccgagagcatccgcgagcagctgcacgccgacgccgtgaagatcgccgaggccgtcggctatgtcaacgccggcacggtggagttcctcgtcgaccgcgacggcaaccactacttcatcgagatgaacccccgcatccaggtcgagcacaccgtcaccgagatggtcacgagcatcgacctcgtgcgcgcgcagatcctcatcgccgaggggcagccgatcagccacccggagatcggtctcggcgaccagaacaacctcaaggtcaacggctacgccatccagtgccgcgtgaccaccgaggacccggccaacaacttcgcgcccgacaacggcaagatcgaggcctaccgctccggcggcggcttcggcgtgcgtctcgacggcggcaacgccggcacgggctcgatcatctcgccgtattatgactccctgctcgtcaaggtcacgagctgggactgcaccttccccgccgtctgccgcaaggctacccgcgccatcaatgaggagcacgtgcgcggcgtcaagacgaacatcccgtttgtgacgaacatcctcacgcacccgacgttcatcgccggcaagtgccacacgaagttcatcgacgagacgccggagctgttcgagttcaccgaatcgcgcgaccgcgcgacccgcgtgctcaaatacatcgccaacatccaggtcaacaatcccgacgccgagcgccaccagtacgacacaccgcgcttcccgaaggcgcagcgcgagatctcgaagcaggacgggctcaagctcctgctcgacaccgacggccccgaggccgtcaaggactgggtcctcggccagaagaagctgctcatcaccgacacgacgatgcgcgacgcgcaccagtccctgctgagcacccgcctgcgcacccgcgacatgctcaagggcgccgacggcacggccgacatcctcgccgactgcttctcgctcgagatgtggggcggcgcgacgttcgacaccgcctaccgcttcctacatgagtccccgtgggagcgcctggagatgctgcgcgagaagatcccgaacatcccgttccagatgctgctgcgcggctcgaacctcgtcggctacgcgagctatccggacaaccttgtgcgtgccttcatcgccgagtccgcccgcgagggcatcgacgtgttccgcgtgttcgactcgctcaactggctgccgaacatggagaccgccatggacgaggtgctgcgtcagggcaagttcctcgagggcaccgtgtgctacaccggcgatatcctcgacccgacgcgcgaccgctacacactcgagtactacgtcaacttcgccaaggagctcgagcgccgcggcgtgcacatgctggccatcaaggacatgtccggcctgctcaagccctacgccgccaagaagctcgtgagcaccctcaagcaggagatcggcatccccatccacctgcacacgcacaacaccaccgacaaccagatcgcgacctatctcatggcggcccaggccggcgtggatgtggtcgacaccgccatcggcccgctggccaacctcacgagccagccgtcgatgaacgccgtcgtcgagtccctgcgcggtcaggagcgcgacaccggctttgacccgcagcgcctgcaggagctggccgattactgggccgacgtgcgcctgcgctacgagagcttcgacaagggcctcaaagtgcccgtcaccgatatctaccgctacgagatccccggcggccagtacacgaacctgcagccgcaggtcgagtcgctcggcctcggccaccgcttcgcggaggtcaaggagatgtaccgcaccgtcaacatcatgctcggcgacatcatcaaggtcacgccgtcgtccaaaatggtcggcgacctggcgatcttcatggtgcagaatgacctcacgcccgaaaacatcgtcgagcgcggcgagaccctcgccttccccgacagcgtcgtgagctacttcaagggcatgatgggccagccgccctgcggcttcccgaaggatctgcagcgcgtcgtgctcaagggcgagaagccgatcaccggccgccccggcgacctgctgccgcccgtcgactgggatcagctgcgcagcgagatccgcaagttctacccgaactacgaggagccgcgctccctcatctcctacgccatgtacccgaaggtctatgaggagtacatccgccaccgcaaggagtatggctacatcatgcgcatgggcagccacgtgttcttcaacggcatggccgtcggcgagatgaacaagatcaacatcgaggacggcaagaccctcatgatcaagtacatcggcctcggcgaccgcaacgacgacggcacgcgcaacgtgcagttcgagctcaacggcatgcgccgtgaggtcgccgtgcccgatccgaccgcgaccgacacggccaagaccgtcgtcatggccgacccgaacgacaagagccaggccggcgcatccatccccggcatggtgtcgaaggtcaacgtcaagcccggcgatcaggtcaaggtcaacgacgtgctcgccgtgatcgaggccatgaagatggagacgagcgtcgtcgcccgcatggacggcacgatcgacgaagtctttgtcaagggcggtcagacggtcaaggccggcgagctgctgctgacgatcaagtaa

SEQ ID NO: 2105 - DNA, 1236 bp, Unknown
  Unknown gut bacteria
atggataacaaaaagctcaagagcagctgggcagccgccttcaccgtggcgtctgtctggttcggcacccacgtgggcgccggctttgcgaccggcaaccaggtcgtgaactacttcgtccagtatggctggaccgcggcaatcttcccgctgctggccatgggcattctggccgtcgtcatgtacatcatgatgaagtttgccaagctcaacggtttcgacaactacaaggacacctatcgcgccctgtatccgaagccgtggatggagatcttcttcgagatcttttacatcatcatcatccttgcggcggtcgcgtcctgcgttgacggcgccggcggcatcgtcaagagcctgatcgacctgcccgatatcatctgcaacctcgtcatcatcgccctgctgatccttctgtcgatcttcggcgttgacctgatcatcaaggcttccaccgttctttccaccgcgatcctgatcgtcaccgcgatcctggtcatcatgggcttcgtcgttccgatcgacgcggttgcccaggagctggccactgagaacgcggcctacgcttccatcccggccatcgcggacgtcacctcccagaagggcctcgagggcgtctggcgcggcgtgttcgtgtacgctgctttccagtgcgtgtccgtcccggccatgatcgctgcttccaccgagctgacccacaagggcgtcaagcgcgccagcatcctcggctggctcatgaacggcggcgcgctcgccgcttccggcgccatgctgctgcgctggtacccggtcctctgcgccatcaagagcgttggtgttgactccgtcgccagcatcgccgcccgccacattgccgacgtcatgaagctccccaaccagagcgtcgtcaccctcatgggcagcggctacacctggctgttcgtcgtgtacaccatcctgctgttctgcgcgttcgtgtccacgtccgtcacgctcgtctactccatgatccagcgcttcgagggccactgcttcccgaaggccatcaagagcaaggctgtccgcagcgtcatcgtcggcctgatcgtcatcggcctgtgctacgcagtttccctgctcggcctgtcgaccatcatctccaagatctatggctatgacggctactacgctctgatcgttgttgtgctcccggcgttcatctggggcatcccgaagatcaagaagctgtctgccgacaagaaggcagagctgtcggagtga

SEQ ID NO: 2106 - DNA, 1362 bp, Unknown
  Unknown gut bacteria
atgagtaaaagctccatcggtaccgagccggtgtacgacgcacgtacactcggcaagtccagaatgttcattctgggtctccagcacatgttcgccatgttcggcgcgaccgtcctcgtcccggcgctgtccggcctcgacgtcgcaacaacgctgctgttcgccggcctcggcacgctgctgttccacctgctgaccaagggcaaggtcccggccttcctcggcagctcgttcgccttcatcggcggctacaacgccgtgcgcaccatcggcacgaatccggacggctccgcgatctataataatgacctgctggcctacgcctgcttcggcgtcgccatcgcgggcctgatgtacatcatcctgtcgaccctgttcaaggtcttcggcgtcaagaaagtcatgcgctacttcccgccgatcgtcaccggcccgatcatcatcgccatcggcctgacgctctcctcttccgccatcaccaactgccgtgccaactggcttgtcgccgtcgtcgcgatcctgatcgtcatcggcttcaacatgtggggcaagggcatggccaagatcatcccgatcctgctcggcgtgctcggctcttacatcttcgcactcatcgttgatcccgcggagcgcgcctccgtcgccgctgccgtcagcagcgccaagtggtttggcctgccgatcttctggaaaaacagcgtgttccacctcttcgccggcccggtcgacagcggcgtcctctggtccgccgtgctgacggtcgtgcccctgtcccttgccaccatggtcgagcacatcggcgacatctgcgccatctcctccacctgcggcaagaacttcatggtcgaccccggcttccaccgcaccctgctgggcgacggcctggccaccaccctcgcttccctcttcggcgctccggccaacaccacctacggtgagaacaccggcgtgcttgccctgtcccgcgtctacgatccccgcgtgatccgcatcgcggcctgcattgcgatcgtcgtgtccttctgcccgaaattcgcggccctcgtgtccgccatgccgacggccaccatcggcggcgtgtccctcgtgctctacggcatgatctccgctgtcggcgtgcgcaacgtcgtcgagaacaaggtcgacttcaccaacacccgcaacgtcatcatcgccgcgctcatcctcgtgctcgccatcggcatcacctactccggcagcatccagatcggcatcgtatccctgtcgggtctggctgtctcctccatcgtgggcatcctgctcaacgccattctgcccggcaaggactacaccttcgagcaggacgataagggcgcgacctctgtggacttcaaggtctga

SEQ ID NO: 2107 - DNA, 1776 bp, Unknown
  Unknown gut bacteria
atgtattacagcagcggtaactacgaggcgtttgcaacgccgaaaaaacccgaaggcatcgacaacaagtcggcatatgtcgtcggcaccggcctggccggtctggcggcggcctgcttcctgatccgcgatgcacagatgcccggcgagcacatcacgctctttgagcacctgccggtggccggcggctcctgcgacggcatctacgacgcgaccaagggcttcatcatgcgcggcggccgtgagatggataaccacttcgagtgcatgtgggatctgttcaagtccatcccgtcgatcgtgaacccgggcgagacggtcttctccgagtactactacctcaacaaggaagacccgaacttctccctgtgccgtgtcaccgagaagcagggccaggacgcccacaccgaccgtaagtacggcctgacgcccggcgccgccacccagctgctgaagctgttcatggcgaccaacaagtccctcgaggacaagaagatcgatgacgtgttcgacgatgagttctacgccacgaacttctggacctactggcagaccatgttcgcgttcgagaagtggcacagcgccctcgagatgaagctctacctgcagcgctacatccaccacatcgacggcctgccggatctgagcgcgctgcgtttcacccgctacaaccagtatgagtccatgatcctcccgatgtgcaaatacattaccgaccacggcggaaaggtcctcttcgacaccacggtcacgaacatcgtctgcgactgcaccgaggataagaaggtcgccaagaagatcgagtacacccagggcggcgtggaaaaggtcatcgagctgactgagaacgatctcgtcatctgcacgaatggctgccagggcgatgcgtccgcttacggcgatcagacgcacgctccggtcatcaaggtcaagaacggcgaaggcccgtccatcgagatgtggaagaagctcgccgcgcaggatccggcgttcggccatcccgagaagttcttcaaggacatcaaggagaccagctgggagtcctggaccgtcgacacggccaacaagcagatcctcgacgccatccagaagatctgcaagcgtgacccgctgtccggcaaggtcgttaccggcggcatcgtcacctgccgcgattcgagctggctcgtcagctggaccatcaaccgtcagggccagttccaggagcagccgaaggatcactgcctgatctgggtctacggcctcaactgctgggacgacaagggcgacttcatcaagaagaacatgtgcgactgcaccggcatcgagctggcggcagagtggctgtaccacatcggcatccccgaggatcagatcatggatctggccacgaacgaatgcaacaccacgccgtgcatgatgccttacgtcaccacgttctttgagcccagagccgaaggcgaccgcccgaaggtcgtgcccgatggttccgtcaacctcgcgttcgtcggccagttcgccgataccccgcgcgacaccgtgttcaccaccgagtactccatccgtaccgcgatggaagcggtctacacgctctgcaatgtcgaccgcggcgtgccggaagtctggggcagcgtgtatgatatccgcgacctgctctacgccaccagcaagctgctcgacggcaagaagccgctggagttcctgctcccgtcggttctgccgctgctcgacctcgtcaaggagccgctggtcaacaacgtcgtggtggatctgctcaagaagtataacatcgtctga

SEQ ID NO: 2108 - DNA, 1080 bp, Unknown
  Unknown gut bacteria
atggcattgacgcttatgaagggtagcgaagctatcgctgaggctgcgatccgtgcaggcgcgcgttacttcttcggctatccgatcactccgcagacggagattcctgaatacatgtccgcacgtatgcccgaagtcggcggctgcttcctgcaggccgagagcgaagttgcggctatcaacatgatttacggcgcagccggtgctggtgcacgtgcgctgacctcttcctccagccccggtgtcagcctgaagcaggaaggcatttcctactgcgcaggcgcgcagctgccggctgtcatcctgaacgtcatgcgcggcggccccggcctcggcaacattcaggcttctcagggcgattacttccaggctgtcaagggcggcggcaacggtgactatcacctgctgacctatgctccggcatccgtgcaggaagcgatcgacatcatgatgtacgccttcgacaaggctgagaagtaccgtataccggtcctcttcctggctgacggcatcatcgctcagatgatggagcccgtggagatgcccgagatggtcgactacaagatcgacccggagaagaagccttgggcctgcaccggctggaaaccgggcgatgatccggcaaagcgcggcgtcatcaactccatctacatcgataccgagaccctgtccgtccacaacgacgagctgcaggcctgctatcgtgagatcattgccaacgagcagcagtgggaagagtacaacctcgagggtgctgagtatgtcatcaccgctttcggcacggttgcgcgtattgccaagtctgcgatcgttgagctcaaggagcagggcatcaacgttggtctggtccgcccgatcaccgtttggccgttcccgtacgacgccgtcaagaaggctgcggagcagccgggcgtgaaggctgtgctcgatgtcgagctgaacgaaggccagatgctcgaggacgtcaagctcgccatcaacggcgcaaagccggtcgacttctttggccacctcggcagccagatgccgaccaccgaagagatcaaggcgaagattatcagcatgaaggagggcaagtaa

SEQ ID NO: 2109 - DNA, 1101 bp, Unknown
  Unknown gut bacteria
cgcccgacgtctgagacgctcttctgccagcactggagccacatcgtgcacagctggcgcgacctgccgtgcctgtataaccagtggtgcagcgtcgtgcgctgggaaaagaccacccgcccgttcctgcgcgggcgtgagttcctctggcaggagggccacaccctgcacgccactgaggccgaggcccgcaaggagacgctgcagatgctcgaaatttatgccgagacctgcgagcaggagctggccatgcctgtcatccgcggcaacaagaccgacaaggagaagttcgccggcgccgaaaacacctacaccatcgagtgcatgatgcacgaccacaaggcgctccagtctggcacgagccactacttcggcgacgggttcgcccgcgcgttcgacatcacctacaccgacaagaacaaccagcaggtctacccgcaccagacctcgtggggcctgtccacgcgcgtcatcggcggcatcatcatgacccacggcgacaacagcggcctcgtcctgccgccgcacatcgcgccgatccaggtcatcgtgctgcccatcgcggcgcacaagcccggcgtgaccgagaaggccgaggagctcgttgcgcgcctgaaggccgccggcctgcgcgcgcagggcgacttcagcgacaacagccccggctggaagttcgccaactgggagatgaagggcgtgccgctgcgcatcgagatcggcccgaaggacatcgaggccggccactgcgtcgccgtccgccgcgacaacggcgagaagatcaccgtcgcgctcgatgagctggaggcgcgcatccctgagctgctcgagaccgtgcagcagggcctgttcgacaaggccaagcgcaacctcgacgagcacacctatgccgcgcactcgctggccgaggccaaggaactgcaggagaaaaacggcggcttcatcaagaacatgtggtgcggcgacctcgcctgcgagctcgagatgaaggacaaggccggcatgtccagccgctgcatcccgtttgagcaggagcacctcgacgatgtgtgccccgtgtgcggcaagcccgccaagtgcatgatctactggggcgtggcgtac

SEQ ID NO: 2110 - DNA, 999 bp, Unknown
  Unknown gut bacteria
atgaatctcaaaggcaacgattttctcaagctgctcgactacacccccgagcagatcgactatctgctccggctcgccgcccagctcaaggccgagaaaaaggccggcatcccgcaccgcctgtgcgagggcaaaaacgtcgcgctcatcttcgaaaagacgagcacgcgcacgcgcagcagcttcgaggtcgcggcgcacgatctgggcatgggcagcacgtatctcgactccaccggctcgcagatcggcaagaaggagagcatcgccgacacggcgcgcgtgctctcgggcatgttcgacggcatcgagtaccgcggcttcggccagtgcatcgtcgaggagctggcgcagtacgcctccgtcccggtctggaacggcctgacggatgagttccacccgacgcagatcctcgcggactttctgaccatccgggagcacttcggctcgctggagaacatccacctcgtctacatgggcgatgcgcgcttcaacatgggcaactccctcatggtcggctgcgcgaagatgggcatgcacttcacggcctgcgcacccaagggctacttccccgatgcgcagctcgtcgccgagtgtcaggccatcgcggcgcagacgggcgcgacgctcgacttcatctccgaccccgccgcggccgtgcagggcgcgaacgtgatctataccgacatctgggtctccatgggcgaacccgagagcgtctgggccgagcgcattgccgcgctcgcaccgtatcaggtcaacgcggcgctcatggccaaggccgaccccaacgccatcttcatgcactgcctgccggcgtatcacgacaaaaagaccgccatcggcaacgagatgtgcacgcgcttcggccgcgaggcgatggaggtcacggacgatgtgtttgaaagcgcgcagtcggtcgtgttccaggaggccgagaaccgcatgcacaccatcaaggccgtcatggcggcgacgcttgcggagatcgagctatga

SEQ ID NO: 2111 - DNA, 771 bp, Unknown
  Unknown gut bacteria
gagcgcgtgcccgcgctggtcgaggccggtgtggacgtgctcgtgatcgactcgtccgagggctactccgagtggcagaagcgcacgctcgagtggatccgcgagcgctacggcgacagcgtcaaggtcggcgccggcaacgtcgtggacgcggacggcttccgcttcctggccgactgcggcgcggacttcgtgaaagtcggcatcggcggcggctcgatctgcatcacgcgtgagaccaagggcatcggccgcggccaggcgaccgccgtcatcgaggtctgccgcgcacgcgacgagtacttccgcgagaccggcatctacgtgcccgtctgctccgacggcggcatcgtgcacgatcaccacatcacgctcgcgctggccatgggcgcggacttcgtgatgctcggccgctacttcgcccgcttcgacgagagcccgtcggacaaggtcaacgtcaacggcacgctcatgaaggagtacaggggcgagggctccaaccgcgcgcgcaactggcagcgctacgacctcggcggcagcaagaagctgtccttcgaggagggcgtggactcctacgtgccctacgccggcaagctctccgacaacgtccagcagacgctggcaaaggtccgctcaaccatgtgcaactgcggcgcactgaccatccgcgagctgcaggaaaaggcgcggctgacgctcgtgtcctcggtgagcatcgtcgagggcggcgcgcacgacgtcgtgctcaagacctcgaacaagcccgtgtga

SEQ ID NO: 2112 - DNA, 1026 bp, Unknown
  Unknown gut bacteria
atgaaagaaatgctgcagaagctgcgcgaggcttccgtcgccgccattttgcaggcggacgacatcaccgcgctggaaaacctgcgtgtgaagtacctcggcaaaaagggtgagctgaccgccatcctcaagcagatgggccgcctgtcggcggaggagcgcccggccatgggccagctggcaaaccaggtgcgcgctgagctcgaagaagcgctcgaccagcgccgcgagacgctcaatgcgcacatgctcgagatgcgcctcaaggccgagacgctcgatgtgaccatgcccggaaaagcgccggagctcggccaccagcacccgatgtatatcgtgctcgatgagattaaggacatcttcgtcggcatgggcttcgagatcctcgaaggccccgagatcgaagaggccgaatacaacttcaccaagctcaacaccagcgagggccaccctgcccgcgagtggtcggacacgttctatctgaccgaggacagcagcatcctcctgcgcacgcagacctccccgatgcaggtgcgcgccatggagagcaagccgctgccgatccgcatggtcgcccctggccgcgtctaccgcaaggatgaggtggacgccacgcactcgcccatgttccaccagatcgagggcatggtcatcgacaagggcgtcacgatggcggacctgaagggcacgctcaacacgctcgtgaaaaagctctacggtgagaacaccgtcacccgcttccgtccgcaccacttcccgttcaccgagccgcgctgcgagatggacgtgcagtgccacaagtgcggcggcaagggctgccccacctgcaagggtgagggctggatcgagatcctcggcgccggcatgatccatccgaaggtgctcgagggctgcggcatcgacacggacgtctactccggctgggccttcggcatgggcctggagcgtctggcgatgcgccggttcaagatcagcgacctgcgtctgatcttcgaaaacgacgtgcgcttcctgcagcagttctga

SEQ ID NO: 2113 - DNA, 1935 bp, Unknown
  Unknown gut bacteria
gtgtatttcatgagttacgatgcattgttttctcccatcaagctcagagggcttgagctgaaaaaccgtgtggtcctgccgggtatgaacaccaagatggtcaaggacaagaacgacgtgggcgaggatctgcccgcctaccatgcggcgcgcgcagccggcggctgcggcctgaacattgtcgagctcgtctccatctgccccgagtgccatgcatacctgtacctcggtctttataatgagcaccacagagaccagctgcgcaagatcaccgacgcgatccacgcggccggcggcaaagcaggcgtgcagatctggcacggcggcttcgtgcccgaagagttcttcgacaagaccaacaagcttgagacgcctgacacgctgaccgtcgagcgcatccacgagatcgtcaagcagttcggctactccgccaagctcgctgtcgaggccggctttgacgcactcgagttccacggcgcacacacttatctgccgcacgaattcatgaacccctcgctcaacaagcgcaccgacgagtacggcaaccagagcctggagaaccgctgccgcttcaatctcgaggtcatccgcgagatgcgcaagaacatgccggaagacatgccgctgctcatgcgcctggacgccatcgacgagatgctcccggccgtgaccacgcaggacgagaccgtgcagttcatcaactgggccgccgaggccggtgtcgatgcgatcgacctgtcccgcggcaacgcccgcagccttgcgaccgtgtatgaagtgccgccctacaatctggagcccggcttcaacatggacaacatcgccgccatcaaggcgcgcgtgaacatcccggtcatcggcgtcggccgcatcgtcgaccccgctctggccgatcagctcatccgtgagggcaagatcgacatggtcgccgtcggccgtgcgcagctcgccgatcccgaatggtgcaacaagtccatggaaggccgcgaggcggagatccgccgctgcatcggctgcaccgagggctgctatgacaaggtcatcgacccgaaggccaagcacatcacctgcacccgcaacccggcgctctgcctggagtacaagggcctcccgaagccggagaaagccaagaacgtcatggtcatcggcggcggcatcggcggtctgatggcagccgagtacctcaaggctcgcggccacaatccgaccgtctatgaagccaccgacgccccgggcggccactttgtgctcgccggaaaggccccgaagaagcaggccttcaccgacgccgtcatgtgggacgctgaggagtgcaagcgtatgggcatcgagatcaagaccggcgtgaccgtcacgcccgagctcatcaaggaagtcaagcccgatcacgtgatcgttgccaccggcgcgcactttgtcgccccgaacatcccgggtctcgacaccgcgaaggacgtctacgtggctgaggacgtgctggccggcaaggccatgccgcacggtgaaaccatcatcctcggcggcggcggcgttggctgcgagaccgcgcagttcctcatcgagcacggcgtcaccgatgtgcgcgtgatggattccaagcgcgtcggcaacaagatgggcatgctgcgcaccatgttcctcgacatcgagtaccccggcgagaccatcaagaagagccgcggctctaaaatcaccgccgtcggcgatcacgagatcacctatgcgttcacgaacaaggccaagaagaccgtcgagaagacccgccactttgactccctcgtcatcgccaccggcatgcactcccgcccgacgcaggagctgaccgacgcatgcagcgaactcggcatcccctgcgacgtgatcggcagcgccaagaaggctgacatgggcatcgaagccaccgccgacgcttacgccgccgccatgaacgtctga

SEQ ID NO: 2114 - DNA, 1275 bp, Unknown
  Unknown gut bacteria
atccaccagcacttcaagctggtcgacgtcttcaccgccgctgagaacatcacgctcggcctcgatgaaaagctcgatctcaaggccacggccgcgcgcatccgcagcatctgcgagcgctacggcttcgacctcgacccgaaccagaagatctacgatatgtccgtgtcccagaagcagacggtcgagatcgtcaaggcgctctaccgcggtgcggacatcctcatcctcgacgagccgaccgccgtgctcaccccgcaggagacggacacgctcttcgccgccctgcgcagcatgcgcgacgacggcaaggccatcgtcatcatcacgcacaagatgcacgaggtcgagacgctcagcgaccgcgtggccgtgctgcgccacggccagttcgtgggcgacatgctcacgaaggacaccaacgcgcaggaaatgacgaacatgatggtcggccacgccgtgacgctcaatattgcccggcccgaccccgtcgaccccaagccgcgcatcgaggtcaaaaacctcaccgtgcgcagcatcgacggcatcgtcaagctcgacgacgtgtccttcaccgccaactccggcgagatcctcggcatcgcgggcatctccggctgcggccagaaggagctgcttgaggccatcgccggcctgcagccgaccgaaaacggcagcatctgctacgtcgaggacgacggcacgcgcgaggagctgctcggcaaagatccgctgagcatcgccgagatgggcgtggcgctgtcctttgtgccggaggaccgcctcggcatgggccttgtcggcaacatggacctgtcggacaacatgatgctccgctccttccgcaagggccgcggcatcctcaccgaccgcaagtcgccgcgcaagctggccgagaccgtcgtcgaggaactcgacgtcaacactccgggcgtgaccacgccggtgcgccgcctgagcggcggcaacgtgcagaaggtgctcgtcggccgcgagatcgcctccgcccccaccgtgctgctcacggcctatgccgtgcgtggcctggacatcaacgcatcctacacgatctatgacctcatcaaccggcagaaggagcgcggcgtcgccgtgatctacgtcggcgaggatctcgacgtgctgctcgagctggccgaccgcatcctcgtgctctgcggcggcaaggtcagcggcatcgtccccggccgcggcgccacgaagcgcgacgtcggcatgatgatgacgcagttgggagggaacgaagcccatgcataa

SEQ ID NO: 2115 - DNA, 270 bp, Unknown
  Unknown gut bacteria
atgcgtgcaatcgtaaccgtgatcggaaaagaccgtgtcggcatcatcgccgacgtgaccgccctgctggcgcagtacggcgtgaacgtgctggacatcagccagacggtattgcaggaatacttcacgatgatcatgctcgtggacgcagcgcagtgcaccgtgccgtttgcagacctcgcccgcacgctcgacgaggccggcacacagcgcggcctgcagatccgcgcccagcgcgaggacatcttcaacgccatgcaccgcatctga

SEQ ID NO: 2116 - DNA, 1542 bp, Unknown
  Unknown gut bacteria
atgtcgttaccaatagcactcggttgtatcatcgcagcgcttgtggttggttgtatccttggcgggctttaccgcaaaaaggtctcggagcgcgagatcggcagtgcggaagagaaggccaagcagatcataaatgatgcctataagagtgccgagagcaagcggcgcgagaccctgctcgaggccaaggaagagatccacaagagccggacggagtacgaacgcgaggtcaaggaacgccgcgcggagctgcagaagcaggagcgccgcctccagcagaaggaggagaccctcgaccgcaaaacggacacgctcgacaaaaagacggacgccctcaaccagaagatcgccgcgatcgacaccaagcagaatgagatcaatcagctcaaaaagacccagatggagctgctcgagaagatctccggctatacggtcgaggaggccaaggccttcctcatcaacagcctgaaggacgacgtcgtgcatgagcaggcgctcatggtcaaggaggtcgaggcccagtacaaggatgaggccgatacccgcgcccgcgagatcatcgccaccgccatccagcgctgcgccgccgaccatgccagcgaagtgaccgtgtcggtcgtgccgctgccgaacgacgagatgaagggccgcatcatcggccgcgagggccgcaccatccgcgccatcgcgacgctccccggctgcgagctcatcatcgacgacacgcccgaggccatcacgctctcgagcttcgaccccgtgcggcgcgaagtcgcgcgcatcgcgctcgaaaagctcattcaggacggccgcattcaccccgcccgcatcgaggaaatggtcgccaaggctcagaaggaggtcaacgccaccatcaaggccgagggcgagcgcgccgttttcgagacgaacatccacggcctgcatcccgagcttatcaagctgctcggccgcatgaagtaccgcaccagttacggccagaatgtgctcaaccactccatcgaggtttcgcacattgccggcctgctcgctgccgagctcggcgtcgacgtggccaccgccaagcgcgccggcctcctgcacgatatcggcaaggccatcgaccacgaggtcgagggcagccacgtgaccatcggcgtcaacatcgctcgcaagtacaaggagtccgaggaagccatccacgccatcgagcccccccacggcgacgtggaggcccacaccgtcgtcgcctgcctcgttcaggcggccgacgccatctctgccgcgcgccccggcgcccggcgcgagaacatcgagaactatgtcaagcgtctcgaaaagctcgaggaagtcaccaagagcttccccggcatcgccaactgctttgccattcaggccggccgcgagatccgcatcatggtcaagcccgaggaggtctcggaggatcagatggtgctgctcgcgcgcgacatcgccaagaagatcgaggacgagctgacctaccccggccagatcaaggtcaatctcctgcgcgagaccaaggccatcgactacgcgaagtaa

SEQ ID NO: 2117 - DNA, 1701 bp, Unknown
  Unknown gut bacteria
atgctgacaccctgggcggatacgctcgaccgcgcgcagcccctgccggagtatccccggccgcagatggtgcgcgacagctacctgaatctcaacggcccgtggagctacgcgatcacgacgagcgcgaacaagcccgcgcaggccgacggcacgatccttgtgcccttctcgcccgagagcgagctgtccggcgtgggacacgtcctgcagccggaggaatacctgtggtacatccgcacggtcacgctgccggacggattcaacgtcggccgtgtgctgctgcacttcggcgcgatcgaccagaccgcgaccgtgtggtgcaacggcgtggagctggccacgcacacgggcggctacctgccgttcacggtggacatcaccgaggtgctggccaaggaaaacacgatccttgtgtgcgtgcgcgacgcgacgaacaagtcccagctcccgcgcggcaagcagacgctgcacccgcacggcatctggtacacgccgcagagcggcatctggcagacggtctggctcgagagcgtgccgcagaactacatccgctccctgcacgtgacgccgctgtttgacgcgcatcaggtggagatcaccgtcgagggcgaaggtcagtgcacgatcgacctcgagggcaagcgcttcacgttccccgcgggcgtgccggcgcacgtgccggtgcagtcgtttcgcccctggtcgccggagcacccgacgctctaccccttcagcgtgacgctcggggacgacacggtctacagctactttgccatgcgcaagtgcagcgtcgagacggacaaggacggcgtgcgccgcctgtttctcaacggcaaaccgtattttcacaacggcctgctcgaccagggctactggccggacggactctacaccgcgccgagcgacgacgcgctcgtctacgacatccagctggccaaggacatgggcttcaacatgctgcgcaagcacatcaaggtcgagtgcgaccgctggtactatcactgcgaccggctgggcatgctcgtctggcaggacatgccctgcggcggcaggcgctacgacccgctcatcgtctcgaccccgctcgtgacgggctggcatctcgacgacagctggtatcccctcttcggccgcacgaacgtgacggcgcgcaaggcgtttttgaacgagctgcgcgacatggtcaccacgctctacaaccacccgtgcatcgccgtgtgggtgccgttcaacgagggctggggtcagtttgacagccagacggccgtgcaggtcatccggtccgtggacaagacgcgcacgatcgacccggccagcggctggcacgatcagggcttcggcgatgtgcgcagcctgcacgtgtatttccagaagtacaggttccagcccgataagctcggccgcgccacgctgctgtcggagttcggcggctatgtccaccgcgtcgagggccacgccatcggcggcaaaagcgtcggctacaagacgtgcgacgccccgctctcgctcgagtacgcgctccaggcgctctatgacgagcagatccgccccgccatcgcgcagggcctcagcgccgcggtgtacacgcagctgagcgacgtggagcacgagctcaacggtctcgtgacctatgaccgcagcatcgtgaagctcccggtacagacactgcacaaaatcttttatatcgaaaacgagtga

SEQ ID NO: 2118 - DNA, 1884 bp, Unknown
  Unknown gut bacteria
atgcgtcagagaatcgaatccttggagcagttccgcgccctgcaggccgactacatggccgcgcgcgacgcggaaaaacgtaagatcctcgtctgctgcggcacgggctgtgtcgccggcggcaacctgaacgtctaccacgagctcaaaaagcgcatggacgagctgggcatcccgtgcgaggtgtccctgaccgagcaccacgccgacaccatcggcctgaaaaagtccggctgccacggcttttgcgagatgggcccgctggtgcgcatcgagccggagggctggctgtacacgaagtgtcaggtcagcgacgtggaggagatcatccagaagaccatcctcggcggcgagttcatcgagcgcctgggctacaaccagaacggcgagctgtatgagcgccaggaggacatcccgttttacaaaaagcagacccgccgcgtgctcgagcactgcggccatatcgacgcggaatccatcgaggagtacctgtccatcggcggctacggcgcgctggccaaggccctgttcgagatgcagccggacgagatcgtccaggccgtgagcgattccggtctgcgcggccgcggcggcgcgggcttcccgaccgggcgcaagtgggcgcaggtcgcggcacatacggaagagcccgtcaagtacatcgtctgcaacggcgacgagggcgaccccggcgccttcatggaccgctcctgcatggagggcgacccgcacaaggtcatcgagggcatgatcgtcgcgggcgtggccaccggctccaccgagggctacatctatgtccgcgccgagtaccccatggccgtgcaccggctcaccgtcgccatcgagcaggccaaggagctcggcctgctgggcgacaacatcctcggcagcggcttcagcttccatatgcacatcaactgcggcgcaggcgcgttcgtctgcggcgagggctcggccatgaccgcgtccatcgagggcaaccgcggcatgccgcgcacgaagcccccgcgctccgtcgacaagggcctgtacggcaagcccacctgcctgaacaacgtcgagacgtttgccaacgtgcccgacatcatcaaaaagggcgcggactggttcaaatccgtcggcacggagggcagctccggcacgaaggccttcgccctcacgggcaacgtcgtcaacaccggcctgatcgaagtgcccatgggcacgacgctgcgcgaggtcgtgtacgacatcggcggcggcatcaaaaacggcaaagcgttcaaggccgtgcagatcggcggcccgtccggcggctgcctgaccgaggcgcacatggacctgcccatggactttgactcgctgaaaaaggccggcgcgatcatcggctccggcggcctcgtcgtcatggacgaggacacgtgcatggtgtccatcgcgcagtttttcatgaacttcatctgcaacgagtcgtgcggcaagtgcaccccgtgccgcgagggcacgacccgtatgctcgacattctcacccggatcacgaagggcaacggccgccccggcgacattgaggagctgcgctccctcgccaagatgatccagaactcctccctgtgcggtctcggcaaaacggcgccgaaccccgtgctgtccacgctcgccaacttcgaggacgaataccgcgagcatatcttcgacaagaagtgccgcaccggcagctgccgcagcctgacgacgtatgtcatcgacccggccatctgcaagggctgcacgaagtgcgcgcgcaactgcccggccggcgcgatcaccggcgagctgaaaaagccgcaccacatcgacacagacaaatgcatcaagtgcggcacctgcaagactggctgcccgttcggtgcgatcaaggaggcgtga

SEQ ID NO: 2119 - DNA, 1578 bp, Unknown
  Unknown gut bacteria
ggcggcctgcacggcgtcggcgcctcggtcgtcaatgcgctgtccgagtggctggaagtgaacgtgcacaaaaacgggaagatgtatcagatgaagttctcccgcggcgatatcacgcagcccatgaccgttgtcggcgagacggatcacaccggcacgaccgtgcgcttcaagcccgatcccatcatgttcgaggacacggtctacgactatgagacgctgcacgtgcgcatgcgcgagcaggcgtttctgaacgccggactgcgcatcaccatcaccgaccgacgcggcgaagagcccgtgagcgagtcgatgtgctacgagggcggcatccgcgagttcgtggacttcatcaacaaaaacaagacggccctgcaccccgaggccatctatatgtccggcgagcgcagcgactccatgtgcgagatcgcgctgcagtataacgacggctataacgaggtcatcgtgtcgttcgccaacaacatccacacgccggagggcggcatgcacgagaccggcttcaaggctgcgctcacccgcgcgctcaatgcctacggcaaaaagtccggtatcctcaaggagggcgacagcatctccggcgaggacagccgcgagggcctcacggctgtcatctccgtcaagctcacgaacccccagttcgagggacagacgaaggccaagctcggcaactccgagatgcgcacgctcgtcgattccgttgtgttcgaccgcctgtcgcagtttctggaggagaaccccgccgtcggccgtatgatcatcgaaaaagcgctcacggcctcgcgcgcccgcgaagccgcgcgccgcgcgcgcgaaaacatccgccgtaaaaacgggctcgagggcttcaacatgcccgacaagctgcgcgactgcaacgaccgcgacccgtcgctcaccgaactctacatcgtcgagggcgacagcgcaggcggctcggccacgcaggggcgcgactcgcgcttccaggccattctgccgctctggggcaagatgctcaacgtcgaaaaggcccgcgccgacaaggtctacggcaacgacaagctcacgcccgtcatcacggcgctcggcgccggactgggcgatgagtttgacatcaataagctccgctatcacaaggtcatcatcatggccgatgccgatgtcgacggcagccaaatccgcacgctgctgctgacgttcttcttccgcttcatgcgtccgctcatcgacggcggctatgtctactccgccatcccgccgctgtataagctcaaccgtggcaagaccacgcgcgtggccttctccgacgaggagcgcgataaaatttccgctgagatgcgcggcgacaacccgaacgcgaagatcgacatcaaccgcttcaagggcctcggcgagatggacccgcacgagctctgggagacgaccatgaaccccgagacccgcacgctcaagcagatcacgctcgaggacgccgtgcacgccgacgaggtgttcaccgtgctcatgggcgaaaaggtcgagccgcgcaaggcgttcatcgagcaaaatgccaagtacgcggtcaatattgatatttaa

SEQ ID NO: 2120 - DNA, 348 bp, Unknown
  Unknown gut bacteria
gacgtgaccggccgtgtgcgcacgtacgaagccatcgtcaagggcgagaacatcccgcagccgggcgtgccggagtcgttcaaggtgctcatgaaggagctgcagtccctgtgcctggatgtgcgcatcctcgacgagaacggcgacgagatcgagctcaaggacgacgaggacgattacatcccgggtatgcgcgatgagatgtcctacaagtccgacgatgatgagatcaccggcagcggcttcacgatcgaggacgtaccggtggaggaagatgacagtctcggcgcgttcggcgatgccggcgacgatgactacacggacgattctgataaggaggaggaataa

SEQ ID NO: 2121 - DNA, 1011 bp, Unknown
  Unknown gut bacteria
atgaaatttgcaatgtatggttccggcgcagccggcagcgtcttcgcttcttacctgcgtaagggcggtgcggacattatcctcatcgaccgctacgaagcccacatgaagaaggtcgccgaggaaggcatgcacttcaccatccatcaggaggaaaatggcggctacaaggattacgactaccagctcaagggcttccgcacctacaccaccgctgctgacgcggccgcggcggagggcaaggtcgacgtcatcatctacatgaccaaggcgacccagctcgagcaggccatccaggactccatgcccgtcgtcggcgacacgaccgtcgccgtctccctcatcaacggcctcggcaacgatgacaacctcttcaaggtcttcccgaaagagcgctgcattatcggctccggcgtgctgggcacggctctgcccgaacccgcacactgcgtgtccaccccggccggcggcgtgcagatgaacttcggcggtgcggtccgctcggagctcaccgacgcagcctgcaccgagatgctcaagtgctaccgtgacggcggttgcgacgcttactggcgcgacggcgagccgggcaccgacaacaacatctacaagttcatctggaaaaaggtctgcgtgaacgccactgtcaacaccgtgtgcgcggtcctgcgtctgaagatcggcgaggtcgaggcggatccgttcggccagtggctgttccacagcgtcatccgtgagacctgcgcggtcgcgaccgccaagggcgtgccgatggacgccgatgagttcatcgcccacgatcacaaggacatcgtcaccaacatcgcggactactatccgtccatgtgccaggacatgctcttcaaccaccgccagaccgagatcgacgtgctcaacggcaagatcgccgagtacggtgagcagctgggcatcgacaccccggtgtgcaaggtcctgtcccaggtcgtgcgctgcatccagggcaactacgacaagcagtacctgaagtaa

SEQ ID NO: 2122 - DNA, 297 bp, Unknown
  Unknown gut bacteria
atgagaaccgcttacgatgtcattatccgtcccatcatcaccgagcagtccatggaagacctcgacatcaaaaagtacacgttcgaagtcgccaaggacgccggcaagatcgagatcaaaaaggccatcgaggagatctttgacgtgaaggtcatcaaggtcaccaccacgacgatccgtgccaaggagaagcgcgtcggtgccaacccctccggcatgaccgccaccggcaagaaggccgttgtgaaactgtccgctgattcgaagaacatcgagatcttcgagggcatggtgtaa

SEQ ID NO: 2123 - DNA, 1113 bp, Unknown
  Unknown gut bacteria
atgcataacaaagtccgggaaccgctgttccacatcgtcaagcgcgacacgctgccctggtatcaggcctggggcatccgcgcggtcgccatcgtgctggcgctgctgctgtgcgcgctcatcacgacgctgtgcacccacctcaaccccatcaaggtgttcggcaccatgttcggcggcgcgttcggctcgccgcgcaagatctggatcctggggcagaacctcgccatcctgctgtgcatttcgctggccgtgacgcccgcgttcaagatgcgcttctggaacatcggcgccgagggccaggtgctcgccggcggcctcgccgccgcggcgtgcatgatctgcctcggtgacaagctgcccaacggcctgctcatcgtactcatcgtgatcgccggcatccttgcgggcgcggtctgggccgtcatccccgccatcttcaaggccaagtggaacacgaacgagacgctcttcaccctcatgatgaactacgttgccacgcagctcgtggcctatttcatcatcgtctgggagtcgccgaagggctcgggcaaggttggcatcatcaaccagagcaccgaggccggctggctgccgcagatcggcggctacaagtacctgctgacgatcctcgtcgtcgcggtgctgaccgtgctcgtctatgtctacctcaactacagcaagcacggctatgagatctccgtcgtcggcgagagcgagcgcaccgcccgctacgtcggcatcaaggtcggcaaggtcatcgtgcgcacgatgctgctgtccggcgcgctgtgcggcatcgcgggcgtgctgctcgtgtccggcacggatcacacgatcacgaccaccatcgccggcgggcagggcttcacggccgtcatggtctcgtggttggccaagttcaatcccctcggcatgatcttcacgagcttcctgctcgtgttcctcgaccgcggcgcgggcgagatctcgaccgtgttcggcctcaaccagtcgttcgctgatatcctcagcggcatcatcattttcttcatcatcggctgtgagtttttcatcacctaccggctgagcttccgcaagccggcaaagaaggaggcggcggagcatgtttga

SEQ ID NO: 2124 - DNA, 1413 bp, Unknown
  Unknown gut bacteria
atgtcgaacagcaacaataaatataaaaccctcgtgtccaacaccatgctcatcagcctcggcaccttcggcagcaagctgctggtgtttttcatggtgcgcttttacacgagctatctcacccccgcggactacggcaccgccgacctcatcacgcagacggccaatctgctcttcccgctcatcagcctcggcatcacggacggcgtgttccgcttcgccgtggaccacaccgagcagcggcgcaacattttctccgtcggcgtgtatacgatcctggcgggcgctgtgctactcgtggccattttgccgctgctggggctcttcccgcagtttgacgggttcctctggctgatcgcgctctatacgatgtgctcgtgcttccactcgctgtgcgcgcagtttgtgcgcgccgagggacacacggcgctctacgccgtgcagggcatgatcaataccgtgctcgtcatcggactgaatgtgctcttcctcgtcggcctgcgcatgggcatcacgggctatgtgctctccgtcgcgctggcggatctggcgtgcacgctgcttttgttcgtgcgcgagcggctctggcgtcagctcatgctccgcccgggctgggcggccgcgcgcgagatgctggcctacagcatccccatgatcccgacgacggtgttctggtggatcacgagcgtgtccgaccgctacatggtcacggcctacctcggcgtggacgccaacggtatttacgccgtgtcgtacaagatgccgacgatcctgtcgctcgtgtcgagcattttcatggaggcgtggcagttttccgccgtgtccgaggcgcagggcagccggcgcgagcacatccgcttcttctcgaaggtctggtgctcgttccagtcggtgatgttcctcgccggcgcgtgcatcatcgccttcgccgtgccggagatccacgtgctcacgaccgagcagtattacggcgcgtggctgtatgtgccggtgctcggcatggccatggtcttttccgcgttcgtgagctatctcggcagcgtctacatggtcgaaaagtgcagcaagcgcacgttcaccacgtccatgatcggcgcgctgctcaatatcgcgctcaacttcctgctcatcccgtcgaagcttggcgtgcagggtgcggccatcgccacgtgtgtgagctattttgtcgtgtttgtcatccgggcggtggatgcgcgcaagttcatcccgttccggttttacgttgtcggcgtcacggaaaactgcatcctgctgacggtgcagacgctcttcatcgtcctgcagcttccgggctggaagatcgcgcaggcagtgtgcattttgctgctgctcctgctcaaccgcaagccgcttctggacggcgcgggcaagatcgtccgcttccaccgctga

SEQ ID NO: 2125 - DNA, 687 bp, Unknown
  Unknown gut bacteria
atggaagtcatgtctgatctgctcatcaaactctggcaaaacggcatcttgcagctcggtatctgggagaccatttacatgacgctcatctccacgttctttgcctatctcatcggcctgccggtcggcctcatcctgcgcatgaccgaccgcgacggcatccaccccatcggctggctcaaccgcacgctcggtatcatcgtcaacgccctgcgcagcatcccgttcatcatcctcatggtcgccatgctgccggtggcaaaggccatcgtcggcaccagcctcggcaaccgcgccgtgatcgtgacgctcgtcatcgccgccgccccgtatgtggcgcgcatggtcgagtccgccgccaaggaagtggacgccggtgtcatcgaggccgcgctgtccatgggcgcgtccacgctgcgcatcatctggaaggttatcatcccggaggccaagcccgcgctcatcaccggcgccgtcatctccaccgtgaccatcctcggctactccgccatggccggcacgatcggcggcggcggcctcggccagattgccatcacctacggctaccagaagtacgacgatcagatcgtctggctgtgcgtagcgctgacgatcatcatcgtgcagatcctgcaggagttcggcatgtacatcgcccgccgcaccgaccggcgctcccgcacctga

SEQ ID NO: 2126 - DNA, 1899 bp, Unknown
  Unknown gut bacteria
atgaaacacggatttatcaaggttgcagcggctgctcccgagatccgggtagcagatccgatgttcaatgcggatgccgtcatccgcgccatggacgagcacgcacgcctcggcgtgaaggtgctcgtgttcccggagctgacgctcacgggcgctacctgcggcgatctgttctaccagaacaccctgctcgcgggcgcggcggctgcgctcgaaaaggtcgtccaggcgtccgagggcaaggatatgctcgtgttcgtcggcttgccggtcgcgcagggcgcgaaggtgtatgacgcggcggctgccgtgtgcaacggcgagctgctcggcgtcgtgccggccagctgcccgggcgacaggcactttgccctgcccggcgcgctgctcgacgacattcagatcggctcgctcggcccggtcgatttccacccgcagcagctgttccagcacagcgcagtcagcgagctgaacgtcgccgtgctcgtcggcgcggacgtgtccgccccggtgtccccggccgtgcgccatgcgctcgccggtgcgaccgtgctcgtcgagatggcgggcttcccgatggcgacggactccgcctgccgcgtgaccaccgccgtgcgcgccgagagcgcgaagctgcacgccggcgtcgtgctggcggctcccggcttcggcgagtcgagcaccgacgcgacgtattccggtctgtgcctcgtcgccgaggacggcaaggtgctcgagagcgccgaggacggctgctccgacgtcgtgacggagctggacgtgcagctgctcatcgccgcgcgccgcaaggacgcgaccttcaccggcgatgctgcgtcctacgtcgtcaccgagtggggcgagggcgtggaggagaccgtactcacccgcccgttcggcaagtacccctaccgtccggacgacccggccgattaccacgccgcggccaagcgtctgctgcacatgcaggccgccagcctcgtgcgccgtatgcagtatgccaatctcaagcacccggtcgtcggcatttccggcggcgtggactccacgctcgccgtcatcatctgcgccgaggctgtgaagatgatgggcctgccggccgactacgtcaccgccgtgaccatgccgtgcttcggcacgaccgaccgcacgaagtccaacgccatcatcgtgtccgagcagctcggcgcgaccgtgcgcgtcatcgacatcggcgagagcgtcatgcagcacttcaaggacatcggccacgaccccgaaaaccgcaacgtcgtgtacgaaaactcgcaggcgcgcgagcgcacccagatcctcatggacgtggccaacggctttgccgacggcggcattcatgtcggcacggaggacatgagcgagtttgccgacggctggtgcacctacaacggcgaccacatctccatgtacgacgtcaacgccggctcgaccaagaccatggtgcagatggtcgtgcgctacgtcgccgagacgacggacgacaaagtgctcgccaaggccctgctcgacgtgctcgacacgccggtcagccccgagctgctgcccccgacgcgcaacggcgagatcgcccagaagagcgaggactccgtcggcccgtacaacctccaggacttcttcctgtactacctggtcgatcacggcttcgcgcccgagaaggtgctgcgcctggccgacatcgcctacggcgacgagtttgaccatgcgacgctcaaaaagtggctgcgcagctactgccgccgcctcttcagccagcagttcaagcgctcctgcctgcaggacggcccgacgctcaacggcttcagcttctcgccgcgcaccggcttcagcatgccgtccgacgggtcggatgccctgtatctggcgaccgtggatgcgctgaagtga

SEQ ID NO: 2127 - DNA, 624 bp, Unknown
  Unknown gut bacteria
atggtgctcaaccagctcaagggccggttgaaaaccgctcgcaggggtcataagctcctcaaggataagcgtgacgagctgatgcgtcagttcctcgacaacgtgcgcctgaacaagcagttgcgtgcaaaggtcgagcagggactcacggaggcgttcggctctctgtcggtcgcgtccgcgatcatgtccccggaaatgctcgaacagtcgctgctctacccgcggcagagcgtcgagctgggcatgacctatcagaacatcatgagcgtgaacgtgccggtctacgatttccagacccgcaacagcgatccgtccgagatctttccgtacggctttgcgcagacgtccggtgagctggacgatgcgctcgagaagctggcggaggtgttcaaggacatgctcgagctcgcgcaggtcgaaaagaccacgcagatgctcgcgcaggagatcgaaaagacccgccgccgcgtcaacgcgctcgaatacgttatgatccccgagctggagcagaacattcgttacatctccatgaagctggacgagaacgaaagttcgaccaaggtgcgcctgatgaaggtcaaggaaatggtcctcgaggacgcacaccactacaagcaataa

SEQ ID NO: 2128 - DNA, 627 bp, Unknown
  Unknown gut bacteria
atggctagatataccgaagctgtctgccgccagtgccgcagagagggccagaagctcttcctcaagggcgacagatgctacacccagaagtgcgcgatcgactgcagaggctatgcccccggccagcacggccagggccgcagcaagacctctgagtacggctcccagctgcgcgagaagcagaaagtccgccgctactacggcgtgctcgaaaagcagttccgcagctacttcgccatggccgagaagcgccagggcatcacgggcgagaacctgctcgccatcctggaaacccgtcgggacaccgttgtctaccgtctcggctttgctaggagccgtgcggaggcgcgccagctcgtgacccacggccacttcactgtggatggccgcaaagtcaacatccccagcttcctggtcaagccgggcatggttattacactcaaggactccagcaagagtctcgacaagatcaaggccaacgtcgaagcgaacgcttcccgtcccgcgccgaaatggctggactacgacgccaacaacatggtcggcaaggtcgtggccatgcccgcgcgtgacgacattgacctgcctgtcgaggaacacctcatcgtcgagctgtattccaagtaa

SEQ ID NO: 2129 - DNA, 948 bp, Unknown
  Unknown gut bacteria
atgcccagacaatattcccttgaaaacacaagaaacattggcatcatggcgcacatcgacgccggtaagacgaccacgacggaacgcattctgttctacacgggcgtcaaccacaagctcggtgagacccatgaaggcaccgccaccatggactggatggcgcaggagcaggagcgcggcatcacgatcacgagcgctgcgaccacttgcttctggaagggcaaccgcatcaatatcatcgacaccccgggccacgtcgacttcaccgttgaggtcgagcgcagcctgcgcgtgctcgacggctgcgtgacggtcctttgtgccaagggcggcgttgagccgcagtccgagacggtctggagacaggctgaccattacaatgttccccgcatgatctacatcaacaagatggatatcatgggcgcaaatttctacaacgttgtcgacatggtgcacgagcgcctgcgctgcaacgctgttccgatccagctgccgatcggctccgaggcggacttccgcggcatcatcgacctgctcgagatgaaggcggacgtctactacgacgatcttggcaaggatatgcgcgtcgaggagatccccgaggacatgcgcgccgaggccgaagagtaccgcacgcagctccttgaggccgtcgccgatttcgacgacgagatcatggagatgtatctggaaggtgaggaaatccccaccgaaatgatcaaggcggccatccgcaaggccacgacgcaggtcaagttcgtcccgatcgtgtgcggcacgtcctataagaacaagggcgtgcagaagctgctggacgccatcgtcgattatatgccgtccccgctggacatcccgccgatcaccggcacggtgcccaagacggatgaggtcgagcaccgctccgcggacgattccgagccgttctctgctctggccttcaagatcatg

SEQ ID NO: 2130 - DNA, 1236 bp, Unknown
  Unknown gut bacteria
atggaggcaaccattatgaaaaaagaagatatcaaaaaagtcgtccttgcttactccggcggtctggatacgtccatcatcatcccccggctgaaggagaactacaataactgcgaagtcatcgccgtgtccggcaacgtcggccaggccggcgagctcgacggcctcgaagagaaggccatcaagaccggcgcgtcgaagctctacgtgctcgacctgacggacgagtacgtagacgattacatcatcccgactatgcaggccggcgccgcgtacgaggagtacctgctcggcacgagccacgcgcggccgtgcatcgccaagggcctcgtcgagattgcccagaaagagggcgccgacgccatcgcccacggctgcaccggcaagggcaacgatcaggtccggttcgcgctggccatcaagcacttcgcgcccgaaatgcccatcatcgccccgtggcgggagtgggacatcaagtcgcgtgaggaagagatcgcctacgccgaggcgcacaacgtgcccctgaagatcaaccgcgagacgaactactccaaggacaagaacctctggcacctgagccacgagggtctcgacctcgaggatccgggcaacgagccgcagtacgagaagccgggcttcctcgagatgggcgtcagccccatcgacgcgccggacgccccgacctacgtcacgctcgactttgagcagggcaagcccgtcgcgctcgacggcgagaagatgagcgccaaggacatcatcctcaagctcaaccagatcggcggcgccaacggcatcggcattctggacatcgtggagaaccggctcgtcggcatgaagtgccgcggcgtgtacgagacgccgggcggcacgatcctctacaaggcgcacagcgtgctcgagacgctctgcctcgacaagatgaccatgcacgagaagcagaagctcgccgtgaccttcggcgaactggtgtacaacggccagtggttcacgccgctgcgcgaggcgctcagcgcgttcgtgaccaagacgcaggagcacgtcaccggcacggtgcggctcaagctctacaagggcaacatgatcaacgccggcgtctggagcccgtactccctgtactccgaggagatcgccaccttcggcgagagcgactacaaccaggcggacgccgccgggttcatccagctctacggtctgccgatcgccgtgcaggcaaaggttgacggcaagagcatgtaa

SEQ ID NO: 2131 - DNA, 1299 bp, Unknown
  Unknown gut bacteria
atgaatacagagtccatgtacaccgcgctcggcatcacgccggcggtgcaccgcttcggcgaggaggtgctcgccggtctgcgcacgcgctttgacgagatcgaccgcgtcgcggaatataaccagtgcaaggtcatcggcgcgatgcagaaaaaccgtgtcgacgcgacgcactttgccgccaccacgggctacggctacaacgacgccgggcgcgacaatctcgagcgcgtctatgccgactgcttccacacggaagccgcgctcgtgcggccgcagatcacctgcggcacgcacgcgctgaccgtggcgctcagcgccaacctcctgcccggcgacacgctgctcagtcccgtcggcgcgccgtatgacacgctcgaggaggtcatcggcatccgcccgagcgcctgctcgctcaaggaatacggcgtgcactaccggcaggtcgacctgctgccggactacggctttgactatccggccatcgagcaggcgctgcgcggcggtgtgaagctcgtgaccatccagcgctcgaaaggctacgccacgcggccgacgttttccgtgaagcagatcggcgcgatgatcgcgttctgcaagcgcatcgacctgaacggcatctgcatgatcgataactgctacggcgagttcgtcgagacgatcgagccgtccgacctcggcgcagacatgatcgtcggctcgctcatcaagaatcccggcggcgggctcgcgcccatcggcgggtacatctgcggccgcaaggatgtggtcgatcgctgcgcctttcgtctgagcgcccccggtctcgggcaggaggtcggcgcgaacctcgggctcatgccggcgttttatcagggctttttcctcgcgccgaccgtgacggccggtgcgctcaagggcgcggtgttcgcggcgaatgtctatgagcggctgggctttcgctgcatcccgaacgcggcagagccgcggcacgacatcatccagtgcgtggagctcggctcgccggagcgcatggtcgccttctgcaagggcatccaggcggccgcgcccgtggacagctacgtcgaccccatcccctgggccatgccgggctacgattcggaggtcatcatggccgccggcgcgttcgtgcagggctcgtccattgaactctcggccgacgggccgatccgcccgccctacgccgtgtattttcagggcggcctgacgtggtatcacgccaaactcggcatcctcatgagcctgcagaagctcgtggacgccggtctcgttacactcgatcaactggaggagaaataa

SEQ ID NO: 2132 - DNA, 1839 bp, Unknown
  Unknown gut bacteria
atcatcgacaccccgggccacgtcgacttcaccgttgaggtcgagcgcagcctgcgcgtgctcgacggctgcgtgacggtcctttgtgccaagggcggcgttgagccgcagtccgagacggtctggagacaggctgaccattacaatgttccccgcatgatctacatcaacaagatggatatcatgggcgcaaatttctacaacgttgtcgacatggtgcacgagcgcctgcgctgcaacgctgttccgatccagctgccgatcggctccgaggcggacttccgcggcatcatcgacctgctcgagatgaaggcggacgtctactacgacgatctgggcaaggatatgcgcgtcgaggagatccccgaggacatgcgcgccgaggccgaagagtaccgcacgcagctccttgaggccgtcgccgatttcgacgacgagatcatggagatgtatctggaaggtgaggaagtccccaccgaaatgatcaaggcggccatccgcaaggccacgacgcaggtcaagttcgtcccgatcgtgtgcggcacgtcctataagaacaagggcgtgcagaagctgctggacgccatcgtcgattatatgccgtccccgctggacatcccgccgatcaccggcacggtgcccaagacggatgaggtcgagcaccgcgccgcggatgattccgcgccgttctccgctctggccttcaagatcatgaccgacccctacgtcggccgtctggcgttcttccgtgtctattccggcacgatcgaagccggcaaatccgtcctgaactccaccaagggccagcgcgagcgtctgggccgcatccttttgatgcacgccaaccaccgcgaggatatcacgcaggtgtattccggtgacattgcggcggcggtcggtctcaagaatacgacgaccggcgacacactctgcgacgaaaagtacccgatcgtgctcgagtcgatggagttcccggaaccggtcatccgcgtagcaatcgagcccaagaccaaggccgggcaggagaagatggacatcgccctcggcaagcttgccgaggaagaccccaccttcaaggcctacacggacgaggaaacgggccagaccatcattgccggcatgggcgagctccatctggagatcatcgtcgatcgccttctgcgcgagttccgcgtcgaggcgaatgtcggcagacctcaggtctcctataaagagaccatcaccaaggccgctacggtggacacgcgctacgcgcgccagaccggcggcaaaggccagtttgcacacgtcaagctcatggtggaacccaacgagcccggcaagggttacgagttcatcaaccagatcaccggcggtgcgatcccgaaagagtttatcccctgtgtggatcagggcatccagggcgcgatgcaggccggcgtgcttgcgggctacgaggtcgtggacgtgaaagtcacgctgctcgacggctcgtatcacgaggtcgactcgtccgagatggcgtttaagatctgcggcagcatggcattcaaggaggcctgccagaaggccggcccgacgctcctcgagcccattatgaaggtcgtcgttacggcgccggaaagctatatgggcgacgtgatgggcgatatcaatgcccgccgcggccagatcgccggcacggacatccgcaacggggcggcgatcgtcacggcgaacgtgcccctggcatccatgttcggctatgcgaccgacctgcgcagcaaaacgcagggccgcgcgacctatagcatggagcccagccacttcgtagagctgccgaagtctcttcaggagaagatcatccacggcagcaactga

SEQ ID NO: 2133 - DNA, 1029 bp, Unknown
  Unknown gut bacteria
tatatggtcacggataacgacaagatggaggccgtcattgacgacgcgctcatcctcatcacggacaagaagatctcgaacattcaggagatcctgccggtgctcgaggccgtgctgaacgcgggcaagaagctcgtcatcatcgccgacgacatcgagggcgaggcgctggccaccatcatcctcaacaagctgcgcggcacgttcacctgcgtgtgcgtcaaggcccccggcttcggcgaccgccgcaaggaaatgctgcaggatatcgccatcctgaccggcggccaggttatctcgaccgacctcggcatggagctcaaggacaccacgctggctcagctgggccgcgcgcgtcaggtcaaggtcacgaaggagaccacgaccatcgtcgagggtgccggggccaaggacgacatccagggccgcatcgcgcagatccgcgcccagatcgagacgacgacctccgagtacgacaaggagaagctgcaggagcgcctggcaaagctgtccggcggtgttgcggtcatcaaggtcggcgctgcgaccgagaccgagatgaaggaaaagaagctgcgcatcgaggacgcgctcaacgcgacccgcgcagccgtcgaagagggcatcgtggccggcggcggcacggcgtatgtcgtggccagcaaggccgcacaggcgaccgctgccaagctctccggcgatgagaagaccggcgcgaacatcatcgcagccgctctgcgcgccccgatctgccagatcgcggccaacgccggtgttgagggtgcggtcatcctcgacaaggtcagcaagagcaagagcgtcaactacggctacgacgccgcgcacgacaccttcggcgacatgatcgaaaacggcatcgtcgacccgaccaaggtctgccgcagcgcgctcgagaacgccgcgtccgtctcctccatggtcctgaccaccgagtccctcgtggccgacctgcccgagaaggccgctccggccgccccggctgccccggacatgggcggtatgtactga

SEQ ID NO: 2134 - DNA, 1314 bp, Unknown
  Unknown gut bacteria
atggagaaactcttcaaactcagcctgcgcggtacggataagaaaaccgagatcatcgcgggcctgaccaccttcatgaccatggcgtatgtgctggccgtccagccggccgcgatctgcggcggcgaggcgtacatcacggatgtcaacggcgttgtcatcaccaagtccgccatcatgatcacctgtgcgctcgtgtccggcctcatcacgctgctgatggccttctacacgaacttcccctttgcactctcgaccggtatgggctcgaacttcattctcggcgcgctcatccagtcccaggcgctgagcttcggcgccgccatggcgatcacgctcatttccggtatcgtgttcgtgctgctgacggtctttggcctgcgcgacctgatcgtgcgcgtcattcccaagaacattaagatcgccatttccgcgtccatcggcttctttattgcctccctcggcttcaaaaactgcggcatcggctcgtttgaaaacggcatcgccctcggcaacctcaccgatcccgccgtgctgctggccattggcggcctgctgctcatcattgtgctcaacgccctgaacgtcaagggcgccatcctcatcagcatcattgccaccacgctcatcggcatcccgctcggtgtgacgacgctcaacggtgttgccgccgtgccggatttcggcgagctgggcaacgtcatgttcaacctcgatttcaagggcgtgttcaccgcgagcgggctcatccttgtgtttgtatgtttcttcggtgatttcttctccacgctcggcacggtgctcgccgttgccaaccgcgccaacatgctcgatgaaaacggcaacctgcccggtatcgagcggcccttcctcgtcgacgccatcggcacctgcatcggcgcgctgaccggcaacaccaccatcacgacctttgtcgagtccacctccggcgtcgaagccggcggccgcaccggcctgaccgcgctcgtcaccggcatcatgttcctgctgacgatcttccttgcaccgctgttcgtcgccatcccgtatgccgcgaccggcccggcgctgatctatgtcggcttcctcatgctcaagggcttcacggagatcgacttcacggactttgacgacgccatcggcccctgcgtcatgatgatgttcacggccttcaccggcaacatcaccaacggcctcggcgccggcatcatcgtgcacgtgctcgtcaagctcgtgcgcggcaaggccaaggagatccacccgatcatgtacctgctgtgcgcgctcatggtcctgtacttcatcgttggataa

SEQ ID NO: 2135 - DNA, 738 bp, Unknown
  Unknown gut bacteria
atgagctacaccccgtttgatgcaattcagatcggcattgcctcccctgaaatgatcctttcctggtcctccggcgaagtgaaaaagcccgagaccatcaactaccgcacactcaagcccgagcgtgacggcctgttatgcgagcgcattttcggacccacgaaggactgggagtgccactgcggcaagtataagaagatcatctacaagggtaagatctgcgaccgctgcggcgcagaagtcacgcgcgcaaaggttcgccgcgagcgcatgggccatatcgcgctggccgcgcccgtgagccacatctggtacttcaagggcatcccgtcgcgcatgggcctgatcctggatctgaccccgcgcgtgctggaaaaggtgctgtatttcggcgcgtatatcgtcaccgaccccggcatgacgccgctgcagcgctgccagatcctgtccgaaaaagagtaccgcgacatgcgcgagaagtatgaggacgatttcgaggccggcatgggcgctgaggccatcaagaagctcctgcagcagatcgactgcgccaagctctccgagcagctgcgcgccgagctcgaggaggccagcggccagaagaaggcgaagatcgtcaagcgcctggaggtcgtcgaggcattccaccgcagcggcaaccgtccggagtggatgatcattgacattctgccggtcatcccgcccgagcttcgccccatggtccagctcgacggcggc

SEQ ID NO: 2136 - DNA, 726 bp, Unknown
  Unknown gut bacteria
atgatttctgttcgcacgaaattgtattttagcatggaaaacctgatattgcaacagtttttcgtgtttacattctccgaacggcatgataaaatgtgttcatatctgtatttttcgtttttgagggggcagaccatggattccaacttctttgcgctcatttcgcgcatgcgctatatcgcgcgctggggcctgatgcgcaacgccctgcccgagaacattcaggagcacagccacatggtggccgtgctggcgcatgcgctcggcgtcatccggcgcgacattttccaccagccgtgcgacgtcaacgcgctcgcaactgcggcgctgtatcacgatgcgtcggagatcctcacgggcgacctgccgacgccgatcaagtatcacaacgcggagatcatgtcggcctaccacgcggtggaggatctggccgtgcagaagctgctcggcatgctgccgccggagctgcgcgagacctatgccgatgtgctcgccgaggataaggacggcgacatttacccgctcgtgaaggcggccgacaagctctcagcctacatcaagtgcatcgaggagcgcaaggccggcaacaacgagtttctctccgccgaggcgcagacgcgcgcggcgctcgaggcatcccccctgccggaggtgcagtattttctggagcatttcatccccgcgttcgagcgcgatctcgacgagctcggcgcgatcggtcaataa

SEQ ID NO: 2137 - DNA, 3981 bp, Unknown
  Unknown gut bacteria
gtgcgcaccatgccgattgattccagcatccgcaaagtcatggtcatcggctccggcccgatcgtgatcggtcaggcggcggagtttgactatgccggcgcgcaggcgtgccgcgtgctgcacgacgcgggcgtgaacgtcgtgctcgtcaactccaaccccgcgacgatcatgaccgacaaggccctcgcggatgagatttatctcgagccgctcacgctgacctccgtcaagcgcattattgaaaaggagcagccagacagtcttctcgccggtctcggcggccagacgggcctgacgctggcgatggagctcgacaaggagggctttttgcagcagcacaacgtccgcctcatcggcacgaacgccaaagccatcgacaaggccgaggaccgcgagctcttcaaggagaccatggccgccatcggcgagccgaccatcccctccggcatcgccaacaccgtggcggaggcgctcgccgtagcagaccgcatcggctaccccgtcatcatccgcccggcgttcacgctcggcggcgcgggcggcggcgtggcctacagcccggaggaactcaccgtcgctgcgcagaccggcctcgatgcgtccccgatcacgcagatcctcgtcgagcgctacatctacggctggaaagagatcgagtttgagaccatgcgcgacggcgtgggcaacgtcatcgccgtgtgcagcatggaaaatttcgaccccgtcggcgtgcacaccggcgacagcatcgtcgtcgccccggcgctgacgctctcggacaaggagtttcagatgctgcgcagcgcggcgctgaacatcatctccgcgctcgatatcgtcggcggctgcaactgccagttcgcgctcaaccccgacagctttgagtacgccgtcatcgaggtcaacccccgcgtggcgcgctcgtcggcgctcgcgtcgaaggcgaccggctacccgatcgccaagatcacgacgaagatcgccctcggctacacgctcgatgaaattcaaaacgacatcaccggcaagacctgcgcctgcttcgagcccgcgctggactacgtcgtcgtgaagttccccaagtggccgtttgacaagttcgtcggcgcgtcccgccgcctcggcacgcagatgaaggccaccggcgaggtcatggccatcggcacgaactttgagagtgcgctgctcaaggcggtgcgcggcgccgagatccatctcgacacgctgcacgcaaagcccttgtccgaccgcccggtgcgcgaccggctcgccgactgcgacgatcaccgcctgttcaccgtctttgaggcgctgtgcagcggcgtgtccatcgacgagatccacgacatcacccgcatcgaccgctggtttttgtcccggctgcaaaacctcgtggactacgaggcaagcattcaaaacggcctgacgccggagctttatcagcgcggcaagtacctcggctatccggacgcggcgctgcgccgcctgtccggcagcgagacgctgccccccttccgcgcgggctacaagatggtcgacacctgcgccgccgagttcgacgcgcagacgccgtatttctacgccagcgcggacgcgcgctgcgaggcacgcaccttcccgcgcagcggcaagcccgtcgtcatggtgctcggctccgggccgatccgcatcggccagggcatcgagtttgactattcgtccgtccactgcgtgtggacgctcaaggccatgggctatgacgtcgtcatcgtcaacaacaaccccgagaccgtctccacggactacgacaccgccgaccggctgtatttcgagccgctcacggctgaggacgtgctgcagatcatcgacgtggagcagcccgtcggcgtcgtagtcgccttcggcggccagaccgccatcgcgctcacgcagacgctcgaccgccacggcatccgcatcctcggcacatcggccgagggaatcgacatcgccgaggaccgcgagcggtttgacgagctgctcgagcgcttccacatctcccgcccgaagggcatgggcgtgcagacgctgcccgaggccctgcacgccgcgcagacgctcggctaccccgtgctgctgcgcccgtcgtacgtcatcggcggccagaacatgaagatcgtccacgacgacgccgaggtcacgacgtacatgcagcgcatcctcgcgcagggcatcgacaaccccgtgctcgtggacaagtacatgatgggcacggagctggaggtggacgtcatctccgacggcacggacgtgctcattcccggcatcatggagcacatcgagcgcgccggcgtgcacagcggcgactccatcgccgtctacccgccgtacaacctcaacgacatgatgacggacaagatcgtcgacagctcgcgcaagctcgccctcgcgctcggcacgaaggggcttgtgaacatccagtacctcatctgggaaaacgagctctacgtcatcgaggtcaacccccgcgcctcgcgcaccgtgccgtacatcagcagggtcacggccgtgccgatggtggacgtggcatcgcgcgtcatgctcggcgcgccgctggctggcctcggctacggcaccggcctgcaccccatcccgccgtattacgcggtcaaggtgccggtgttctcgtttgaaaagctcggcgacgtcaacgcctacctcggcccggagatgaagtccacgggcgaggtgctcggcctcggcaagacgatgcaggaggcgctgttcaagggcctgacctcggccggcatggtcgtcggccagcacccggacggccgccacggcgtattcgtgagcgtggacacgcacgacctcggcgagatcgtgtcgctggccaagaagctcgacgacctgcacttcgccctctacgcgaccgaggagaccgccgccgccatcgcgcgcctcggcatcgacgtcgtgaccgtcgacggcatccgcgagagcgaccacgccttcgccctgctcgagagcggctgcatcgactacatcgtctacaccggcgcgctcaaggacgcgaccatggacgattacatcgccctgcaccgccgcgcgctgcagctcggcatcccgtgcttcacctcgctcgacacggccaacgccctggcggacatcatcgccagccgctacaacgagcgcaacaccgagctcgtggacatcaaccacatgcgcaccgagcgccagagcctgaagtttgcgaaaatgcaggccaccggcgacgactatatctacgtcgagaactttgacggacacatcacctgccccgagtcgctgtgcatcccgctctgctcgcgccaccgcggcatcggcggctacggcatcgtgctcatcgagcacagcgacgtggccgacgcgaaaatgcgtgtcttcaaccgcgacggcagcgccggcggcatgggcggcaacgccatccgctgcgtggccaagtacctgtacgacaacggcatcgtgccgcgcgacgatctcacgatcgaggccggcggcaccgtgcaccggctgcacttgtacacgcgcttcggcacggtcggcctcgtgacggtcgacatgggcaagcccgcgtttgagcccgccaatgtgcccgtgatgctcgagggcgagcgcgtgatcgaccggccggtgacgatcgccggcggggagtaccgcatcacgtgcctctcgatgggcaacccccactgcgtcgtctttgccgatcgcgtggatgaggtggacgtcgcgcacctcggcccgcagtttgagcacgcggacatcttccccgcgcgcacgaacacggagttcatccgcgtcgtcaaccgcacgacgatcaagatgcgcgtctgggagcgcggcaacggcgagacccgcgcctgcggcaccggcgcgtgcgcggccgtggtggccgccacggaaaacggcctgtgcccgaagggcgaacccatcaccgtcaaggtcagcggcggcgacctgatcgtcacctatgacgacgac

SEQ ID NO: 2138 - DNA, 1143 bp, Unknown
  Unknown gut bacteria
atgaagcggttatctctgcagtggcgcatcacactgatgacggcggcgctgatcggcgtgacgtgtgtgctcatgaactgtctgatcggctattccggcaagcggtatatggatgcgatcggcagcggcatctcggcttacggcgagatcgaatccggtgcgcccgacgccttcgacccgcagagcaaacagccggatgacgagctgacgatcatcatcagcggcgcgcaggcggccttcggcgtcacgaactggtacatcacggcggcggtcacgctcatcggcggcgtgctcgcgtattttgtcagcggccgcgcgctgcgtccgctgcgcagttttgcagcgcaggtggaaaacattcagccgagcaatctggcgcagtgcaaggtcagtgaggacgtgctgccggagtttcagcgcttcagccgctcgttcaacggcatgatcgaccgcctggacgcgggcttcacggcgcagcggcagtttacgggcaacgctgcgcacgagctgcgcacgccgcttgcgctgatgcaggcgcagcttgagctgttttccgccgagcacgcggacgtcacgcccgaaacggcggcgtttttgagcctgctgcaggagcagacggagcgtatggcgcagatgacgaagatcctgctggagatgagcgagctgcgcaccgtgccctgtgacgaccgggtcgagctcgcgcccatgatcgaggagatcttcaccgatcttgcgccgcttgcagagagcaagtgcatcgcgctggaggccgacggcggcgctgtgctcaccggcagcgacccgctgctgtaccggctgctgttcaacctgaccgaaaacgccatccgttacggtcggccggacggggcggtgcgcatcgcggtcagcgaggcggacgggaatgtacagatccgcgtccgtgaccacggtcccggcatcccggaggcataccgggagagcgttttccagccgtttttccgtgtggacaagtcgcgcagccgggcacacggcggcgtcgggctcggtctgtcgcttgtgtgggagattgccgcgctgcacggcggcacggtgcagatcgagcgcagcggtgcggacggaacggtcatgctcgtgacgctgccgcgcgacggcaaagaatcctaa

SEQ ID NO: 2139 - DNA, 597 bp, Unknown
  Unknown gut bacteria
ttgattctgatcattcttgaggaggattcctatatgattactgcaggcgatttccgcaacggcgttactttcggaatggacggccaggtcatgcaggtcgtcgagttccagcacgtcaagcccggcaagggcgcggctttcgtgcgcaccaagatgaaaaacgtcatcaccggcgccgtgaccgagacgtccttcaaccccaccgccaagttcgagagcgccaccatcgaccgcaagacgatggagtacagctataacgacggcaacctttactacttcatggaccccgagacctacgagctcatccccatcgacgagagcgcgctcggcagcaacttccgcttcgtgaaggagaacatggagtgcgtcatcagctcctacaagggcaaggtgttcctggtcgagccgcccacgttcgtcgagctcgaagtgaccgacaccgatccgggcttcgccggcaacacggccaccaacgccaccaagcctgccaccctcgagaccggcgctgagatcaaggtgccgctgttcatcaaccccggcgaccgcatccgcgtcgacacccgcgtgggcgagtatctcgagcgcgcgaagggctga

SEQ ID NO: 2140 - DNA, 2442 bp, Unknown
  Unknown gut bacteria
atgacctgtgccgaacggcacatcctagtatataaggaggtttccacgatgaaaaacgaagcgtttgcacccacgccggagctgctggccaaaatggacgcctggtggcgcgcggcgaactatctgtccgcctgccagctctacctgctcgacgacccgctgctgcgccggcggctgaccgagcgcgacatcaaaaagaagatcgtcggccactggggcaccgtgcccggccagaacttcatctacacgcacctcaaccgcgtcatcaacgaatatgacctcgacatgatctacctctccggcccgggccacggcggcaacgccatggtcgcgcaggactatctcgacggctcgtacaccgacgtgtacccgaacatcacgcgcgacgcggccggcatgcagcgcctgttcaaacagttttcgttccccggcggcatcccgagccatgtcgcgcccgagacgccgggctcgatccatgagggcggcgagctgggctactcgctcgcgcacgccttcggcgccgtgatggataaccccgacctgatcgccgcctgcgtcgtcggcgacggcgaggccgagaccggcccgctcgccaccgcgtggcacggcaacaagttcgtcaaccccatcacggacggcgcggtgctgccgattttgcacctcaacggcttcaaaatcgcaaaccagacgctcttttcccgcatcagccacgaggagctcgagatgttcttccgcggctgcgggtgggagccgcgcttcgtggagggcgacgaccccgccgagatgcacgccaaaatggccgaaacgatggactgggccatcgaggagatccacgccatccagcagcacgcgcgcaccgcgcacgacaccacgcgcccctactggccgatgatcgtgttccgcgcgccgaagggctggaccggcccgaaggaagtggacggcaagcaggtggaagggtcattccgcgcgcaccaggtgccgatcgccatggacaaccccgagcacctcgtgcagcttgaggagtggctgcgcagctaccaccccgaggaactctttgacgacaacggcacgctcatccccgagctgcaggccctcgcgccgaaggggcagcgccgcatgggcgcgaacccccacgccaacggcggattgctgctgcgcgagctgcgcatgccggacttccgcacatatgagcagcccgtgcccgcgcccggcgccgtcgaggcgcaggacatgaccgtgctcggcgcgttcgtgcgcgacatcatgcgcgagaacatggacgcgcgcaacttccgcatcttcgcccccgacgagactgcctccaaccgcctgagcccggtgttcgaggtcacgggccgccgctgggtcgccgaggcgacggacaacgacgagtttctcgacccggacggccgcgtcatggactccatgctctcggagcatatgtgcgagggctggctcgagggctacctgctcaccggccgccacggctttttcaacagctacgaggccttcatccgcatcgtcgactccatggtcgcgcagcacgccaagtggctgaaagtctgcaaccagctgccctggcggcaggacatcgcctcgctcaactacgtgctcgcctcgaacgtgtggcagcaggaccacaacggcttcacgcaccaggaccccggcttcctcgaccacgtagcgaataagaaggccgacgtcgtacgcatctatctgccgccggacgcaaactgcctgctcagctgctttgaccactgcatccgcagccggaactatatcaacgtcatcgtggcctccaagcacccgcggccgcagtggctgaccatggagcaggccgtgcgccactgcacgcagggcgtgagcatctgggagtgggccagcagcgaccagggcgcagagcccgacgtcgtcatggcttgctgcggcgacacgccgacgctcgagacgctcgccgcagtgaccatcctgcgcgagaagctgccggaagtgcgcgtgcgcgtcgtgaacgtggtcgacctcatgaagctccagccgcacgccgaccacccgcacggcctcacggacgaggactacgacctcatcttcacgaaggacaagcccgtcatcttcgccttccacggctacccgaagctcatccacgagctgacctacacccgccacaaccagaacatgttcgtctgcggctacgtcgaggagggcacgatcacgacgccgtttgacatgcgcgtgctcaacgagctcgaccgcttccacctcgtcatcgacgtcatcaagcgcctgccccagctcggcaaccgcggcgcttacgccgtgcagcagatgcgcgacaagctcgtcgagcaccggcagtatatcgccgcgcacggcgtcgacctgcccgagatcgccaactggcagtggaccggcagcaccagcgccgccacgagctccgagcgctga

SEQ ID NO: 2141 - DNA, 2727 bp, Unknown
  Unknown gut bacteria
atggcaagagaactgatcctgaagctgggcaaaaagatcacggaccgcgtggacgtgaagctcggcatgaccaagctcgacgagaattcgcccgagtattacggcctggccagcgtcgtcaccgacgaaatggcggagcttgcgctcgcgatgaaggtccgtgtcccgaccacaccggccgagatcggcaagaaggtcggcaaggatcccgtctacgtggagcagctgtttgaccagatgtccatgatcggcctgctcgagtacaactgggagaacgccgaccatcacaagcagtggacgctgccgatcttcgtgcccggttctgcggagctgatgaacatgaacctgcagcaggtcgagacgcacccggagatcgcgcagtttttcgagcgcatgtcgtttctgccgctgacgaagatcacctgcatggtgcctcccggaggcgccggcgtcggcatgcacgtcatcccggtcgagaaggccatcccggccacgaacgagtcggtcgatgtcgagcacatctcccactggctgaaaaagtatgaggatcagctcggcgtcggctactgctcctgccgcaatgccatgcgcattcagggcgagggctgcggcgagctgcaggatgagatgtgcatcgccgtcggtcagttttgtgactactgtctcgagaccggcaagggccgcaagatcacctatgatgaggcgatggagatcctccagcgcgccgaggacaacggctatgtccaccagatcacgaacatcgacggcgaggacaagatctttgccatctgcaactgcgcgctcggctcctgcttcgcgctgagaacgagccagctgttcaacacgccgaacatgtccgcctccgcttaccgcgcccacgtcgacgctgaaaagtgcgtcgcctgcggcaagtgcgccgaggtctgcccggccggcgctgccaagctcggccagaagctgtgcaccaagaccggcccggtgacgtatccgaagcagccgctgccggacgacaaccactggggcgagcacatgtggagcccaaactataaggacgacaaccagaagcagtgccacgagtccggcactgccccgtgcaagaccgcctgcccggcgcacatcgccgtgcagggctacatcaatctggccgcgcagggccgctatctggacgcgctcaagctcatcaagcaggataacccgttcccggccgtctgcggcagcatttgcaaccgccgctgcgaggaagcctgcacccgcggcgatgtcgaccgcgccgtcgccatcgacgagatcaagaagtttgtcgccgagcaggagctccaggccgacaagcgctatatcccgaaggtcatcacccaccgcggcatcgccgatccctacccggagaagatcgccatcatcggcgccggcccggccggcctgtcgtgcgcctactatctggcgaacatgggctatgaaaacgtcaccgtgtttgataaaaacgaagtgcccggcggcatgctgaccctcggcatcccgagcttccgcctcgagaaggatgttgtcaacgccgagatcgaggtgctccgtgagatgggcgtgcacttccagtgcggcgtcgagatcggcaaggatctcaccatcgaccagctgcgtgagcagggctacaagggcttctatctggccatcggcgcgcagaagagcgcacccatcggcgtgcccggcgaagagctctccggcgtgtacggcggtgtggacttcctgcgcagggtcaacctcggcaagaagccgcgcatcggcaaaaagtgcgccgtcatcggcggcggcaatgtcgccatggacgtctgccgcacggccatccgcctcggcgcgaaggatacttacatcatctaccgccgcagccaggccgagatgccggcggacgcggaggaagtcgcggaagccatggaagagggcgtgcagttccgcttcctgagcgcaccggccgagatcctcggcgaaaacggcaaggtcaaggccctcaaggtcgagatcatggagctgggcgagcccgatgcgaagggccgccgcaagcctgtcggcaccggcaagttcgagaccatcgaggtcacgtccgtcatcggcgctatcggccagcgcgttgacctcggccatatcgcgccggaggccatggccttcaaccgcaacggcaccgtccaggccgacggcgtgacgtatcagaccgcgcagcccgacatcttcgccggcggcgacgtggtcaccggcccgaagtttgccatcgacgcgatcgcggccggccgcgagggcgctatctccctgcaccgctacgtgcatgagggccagagcctgacgctggcgcgtgacccgcgtgaattctacgagctcgacaagaagcaggccgtcgtgcccatcgactgctttgacgccccggcgcgccagaccgtcgcccacgatgcgagcaaggctaagacgttctcgaacgaccgcatcaccttcaccgaggcgcaggtcaaggcagaggcgtcccgctgcctcggctgcggcgtgtccgtcgtcgaccagaacaagtgcatcggctgcggcctgtgcaccacacgctgcgagtttgacgccatccacctgacccgcgacgtgccggaggccagccgcatgtaccgtaccgaggacaagatgaaggccatcctgccgcacatggtcaagcgcgcagccaagctcaccatcaaggacatcaagggcaagcgcgcgaagtaa

SEQ ID NO: 2142 - DNA, 696 bp, Unknown
  Unknown gut bacteria
atgctcgccgagggcaatgtgcaggaagttatggacctgtcccctgtggcgcatctggccgccatcaagggccgcgtccccttcctgaacttctttgacggtttccggacctcgcatgagattcagaagattgccgtctgggattatgacgatctggccgagatggtggacatggatgcggtcaatgccttccgtcagcgcggcctgaacccgcagcatccgcagatgcgcggcagccacgaaaacggcgatatcttcttccagaaccgtgaggcgtccaataaatattatgacgccgtgccggatctggtcgaggagtacatgggcaagatcaatgccaagatcggtacgaactaccagctctttaactactatggcgctccggatgctgaccgtgtcatcatctccatgggctccatctgcgacgtggccgaggaagtcatcgactacctcaacgcgcacggcgagaaggtcggcctcgtgaaggtccgcctgtaccgtccgttccgcgccgacaagctcattgcggccatcccggcgacctgcaagaagatcgccgtgctcgaccgcacgaaagagcccggtgctcagggcgagcccctgtacctcgacgtcgtcaccgcgctggccaatgccggccgcaacgacatcgtcgtcaccggcggccgctacggtctcggctccaaggacaccccg

SEQ ID NO: 2143 - DNA, 1008 bp, Unknown
  Unknown gut bacteria
atgaagcagtatcgcgtagccattcttggcgccagcggcgccgtcgggcaggaaatgatgaagatcctcgccgagcgcaagttccccgtcggggagctgcacctgctcgcaagcgcccgctcggccggcaaggtcgtgtcgtggcagggacagaatatcgccctcgaggaggcgacggacgccgccttctccggcatggacatcgtcctcggcgcggcggaaaacgacattgccgagcgcttcgcccctgcgatcgtgcgctccggcgccgtgttcgtggataattcctcggcctttcgcctggacccaaacgtgccgctcgtcgtgccggagatcaacgccggagacgtgaagctgcaccacggcatcatctcgaaccccaactgctcgaccatcatcacgctgaccgccatcaacgcgctgcgcaagctctcacccatccgcgacatggtcgtgtcgacgtatcaggccgtatccggcgctggcgcgggcggcccgatcgagctgcaaaacgaggtcgacgccctgcgtgccggcaagagctacgcgccgaaggtgttcgcgcaccagatcgcctacaacgtcatcccgaagatcggcggcgagaagtgcgacggctacacctccgaggagatgaagctccagaacgagggccgcaagatcctgcacctgccggacgtgaacgtctcgtgcacctgcgtgcgcgtgcccgtcgtgcgcagccactccatctccgccgccgtgcacttcgtgcaccacatctccgtcgacgaggcgcgcgcggccatcgccgccgcccccggctgccgccttgtggatgatctcgacgcgctgcagtatcccatgccgctcgacacgtcggatcaggatctcgtgttcgtcggccgcatccgccccgacctgaccgaccccaacggcctgtgcctctggtgctgcggcgaccaggtgcgcaagggcgcggccaccaactgcgtgcagatcgcggagctgctgatccaaaacgcctga

SEQ ID NO: 2144 - DNA, 618 bp, Unknown
  Unknown gut bacteria
atgctcatcaaatgtctgcccgtcgggcacctcatgaccaactgctacatcgtcacggacgagaccacgctcgagtgcgccgtcatcgaccccggcgacgagtccaacaccatcctctactaccttgaggacaaccacctcacctgccgcgccatcctgctcacgcacggccactacgaccacaccggcgccgtctacgccgtgcacgaggagaccggcgcgcccgtgtacatgaacgcgctcgacgcgggcacggccgtcgccttcgacagctacacgttcaccccgcccgagggcacgatcttttataaggagggcgacgaggtcaaggtcggcaatctgaccttccgcgtcatggaaacgcccggccacacgcccggcggcgtgacgctcatctgcggcgacgcgctcttcaccggcgacacgctcttcgccggttcgtgcggccgcacggatttcgccggcggcagcatggaggtcgagctgcagtcgctggccaagatcgcggctctgcccggcgattacgaggtctaccccggccacatggattgctccacgctcgagaccgagcgccgcttcaacccctacctgaccgcgctgcaaaaccgcggacagtaa

SEQ ID NO: 2145 - DNA, 984 bp, Unknown
  Unknown gut bacteria
tccgaggcgcccttccgccgcatctcctatcatgacgcgatggagacctacggctctgataagcccgacctgcgcatcgacctcaccgtgcaggacatgacggcgctcgtcgccggcagcgagtttgcgccctttgccgcgggcaacacggtcaaggccgtcgtcgtgcccgactgcgccatggcgcgcaaggccattgacaagctctgcgccgacgtggaggtacaggccggcagcaagccctactggttcaaggtcgacgagcagggcagcttcgccggcggcatcgccaaattcctcacggacaagacggcggagatcaccgcggccctcggcctgaagccgggctgcttcgtcggcgtgacggccggcaaaaagaccgccgcgcagaaggcggcgggcgtgctgcgcacaaagctcggcacggccgtgccgggccacatggacagggagcggtacgaattttgctggatcgtcgacttcccgatgtacgagatctgcgaggaatccggcgagctggagttctgccacaacccgttctcgatgccgaacggcggcctcgagatcctcgaaaaggccgagcgcggcgaggtcgatccgctcgacatctacgcctaccagtacgacctcgtgtgcaacggcgtcgagctcagctccggcgcggtgcgcaatcacgaccccgagatcatggtcaaggcgttcgagctcgtgcgcctcggcgaggacgatgtcaaggccaagttcccggccatgtacaacgccttctgctacggtgcgcccccgcacgcctgcctcgccccgggcgtggcccgcatggttatgctcctcgcgggcgaggactgcatccgcgagatcattccgttcccgatgaacaagaacgcgcaggacgtcatgatgggcgcgcccggcaccgtcgaaccgcaccagcttgaggagctgcacatcgccgtcgtcggcgacacggagcccgataccgaagcgtga

SEQ ID NO: 2146 - DNA, 1053 bp, Unknown
  Unknown gut bacteria
atgaacgcagaattttttgacgcagttgcagatatcgaaaaagaaaaaggtattccgcgcgaatatatgtatgagaagatccgtcaggccatgctgacggcgttccgcaaggacacgcccgattgcgaggacaacgtggaggttattctcgacgaggcgaaaaagaagatcgagatggtcgtcaagaagacggtcgtcgcgcgcgtcatcgacccgtatgtcgagatcagcgaggaggcggcgcaccgcatcagcaagcgcgccaagatcggcgacgtggtcagcgtcccggttgagaccaagcagttcggccgcatcgcggcgcaggcagccaagcaggtcatcattcagggcatccgcgaggcggagcgcggcatgatctacgaggagttcaactccaaggagcatgagatcctcaccggcgtcgtcaataagatcgacccgcgcaccggctgcgcgtttttgaagatcagctccaactcggactataccgaggccatgcttgccccggcggagtgcatccgcggcgaggtgctgcatgagggcgaccgcatcaaggtctacgtggtcgaggtgcgcaacagcacgcgcggcccgcaggtgctcatcagccggacgcatccgggcctggtcaagcgcctgttcgagctcgaagtcacggagatctttgacggcacggtcgagatcaagtccatcgcccgggaggccggcagccgcacgaagatggccgtctgggcggaagatccggtcatcgacccgatcggcgcgtgcgtcggcccgaagggcggccgtgtcgcaagcgtcgtcaacgaactcggcggcgagaagatcgacatcgtcaagtacagcgaggtgccggaggaattcattgcggccgcactggcgccgtccgaggtgctggaagtgaccctgctcgacgagggcaagagctgccgcgtcatcgtgccggataaccagctctcgctcgcaatcggcaaggaagggcagaatgcccgcctggccgcgaagctcaccggctataagatcgacatcaagccggagagcgaggcataa

SEQ ID NO: 2147 - DNA, 1428 bp, Unknown
  Unknown gut bacteria
atggaaaagctctttcacctgaaagaaaacaacaccaccgtacgcaccgagatcgtcgccggcctgacgacgttcatgaccatggcgtacatcatcgcgctcaacccgaacctgctgaccggcttcggcgcccagggcggctcgcagctgtggaacggcgtgttcctcgccacctgcatcgcctccgccgtcggcacgctcgtcatggcgttcgcggccaacaagccctttgccatggcgcccggcatgggtctcaacagcttctttgccgtcgtcgtggccaacatcgtcaccctgaccggaatgagctacctgcagtcgttccagacggcgctatgcgtcatcctcatcgagggcatcgtgttcatcattctctcggtgctcaaggtgcgcgagaagatcgtcgaggccattccgctcggcatccggctcggcatcgcgccggccatcggcctcatgctgctcaacatcggcatcggttccaacgccggtgtgtactcgagcgacggcggcccgttttacgtcatgcgcgatttcttcggcgcgctcacgcccagccttgccaaggccaacatgggcgacggctacccgcagatggtgctcacggtcgtgaccatgttcgtgggcctgttcctgatcgtgctgttcgcgcacaagaagatcaagggctccgtgctgctgggcatgctctgcgcgtccggcatctacggggcgggcgaggccagcttcctgcacacgaacccgtttgcgtcgctcaagggcgcgtcgttcgtgcctgcgttcggcgacatggccgagacgaccctgttcaagttcgactttgccgccctcggcgagatcggctggttcacggtcgtgacgctcgtcatcacgttctgcatcattgacatgttcgacaccatcggcacgctcgtcggcacggcgagccgcgccggcatggtcgacaaggacggcaacatgccgcgcatgcgcgaggcgctgctggccgacgccgtcggcaccgtcgcgggcgcgtgcaccggcacgtccaccgtcacgacgttcgtcgagtccgcctccggcgtcgaggccggcggccgcacgggcctgaccgctctgacgaccggcgtgctcttccttgcgagcatgttccttgcgcccatcgccgccatcatccccgccgctgcgacgagctccgcgctcatctacgtcggcctgctcatgctcggcggtctcaagaagatcgactttgacgatatctatcagagtctgccggtggccatcatgctcatctccatgccgatctccggctcgatcggccacggcatcggtctgggtctcatcagctattccgtgctcaagctctgcacgggcaagggcaaggaggtctcggtgctgacgtatgtcatctcggtgatcttcctcgtgaagttcttcctcgtcgcctga

SEQ ID NO: 2148 - DNA, 705 bp, Unknown
  Unknown gut bacteria
agcttcgccgcgtctgccgaaagcggaacggtagacattctcaagcatatcgatctgaccgtcgaggatggaaagttcatcgtcatcaccggcccgaacggcagcggcaagtccaccatggccaaactcatcgccggcatcgagcagccgacctccggccagatcctgctcgacggggaggacatcacccacatgtccatcaccgagcgcgcccgccgcggcatcagcttcgctttccagcagccggtgcgcttcaagggcatcacggtctttgacctcatcagcatcgcctccggcaagaagctctcgacgaacgaggcctgcacctacctgtccgaggtcggcctgtgcgcacgggattatgtcaaccgtgaagtgaacgccagcctctccggcggcgagctcaagcgcatcgagatcgcgaccatgctcgcccgcggcacgaagatgtccatcttcgacgagcccgaggccggcatcgacctctggagcttccaaaacctcatcagcgtgttcgagaagatgcacgagacgatccacggcagcatcctcatcatctcgcaccaggagcgcatcctcgagacggccgacaagatcgtcgtgctcgtcgacggcgagatccgcgccaccggcagcaaggatgagatcatgcccgtgctcatgcagtcgtcgggcgtgtgcagccgtctggctgacaaggtctga

SEQ ID NO: 2149 - DNA, 690 bp, Unknown
  Unknown gut bacteria
atgaatatcaaacaacagttcaaggaaggcctcattaccaataacccggtcctcgtgcagctcatcggcatgtgcgccaccatggccatcacgaccagcctcttcaacggcatcggcatgggcctgtccgtgctcgtcattctgacctgctgcaatgtggtcatttccctcatccgcaaagtcattccgaacgatatccgtctggccatcttcgtgctggtcatcgcgggcttcgtcaccatcgttgacctgctgctgcaggcctacgttcccgcgctgagcgcgtccctgggcgtgttcatcccgctgatcgttgttaactgcatcatcatcggccgcgccgaggcgttctgccagaaaaaccccgtcggcccgtcgttcttcgacggcatcttccagggcctcggctacacgctcgtgctcatcgccatgtgcgtcatccgtgagctgctcggcaagggctcgttcggcaccggcatcatcaacaccatcgacggtgtcatcggcaccggcaacggcattcagatcttcccgtccgagtacggcgcgctcgtgctcacgctcccgatcggtggctttatcaccctcggctgcctgattgcgctcatgcagtacgcgctgcgcaagtctgccgagaagaaggaagccaaggaaaaagcgctcgcagcgcaggaaaaggaggcggcataa

SEQ ID NO: 2150 - DNA, 795 bp, Unknown
  Unknown gut bacteria
atggaaatgatcgatttcaacgcgaaaaaaggtttcctgtgcgacatggacggcgtcatctaccacggcaaccacatcctgcccggcgcggcggagttcatccactggctgcaggacacgcacaaggaatacctgtttttgaccaataacagcggcatgaccccgcgcgagctgcaccagaagctctggcgtatggggctcgacgtgccggaggagcatttttacaccagcgcgctggccacggcggcctttctggccgaccaggcgcccggctgctcggtgtacgccctcggcgaggcggggctgctcaatgcgctgtatgaccgcggcatcaccatgaacgacgtcaaccccgactacgtcgtcatcggcgaggcgcgggcctactcgctcgacacgctcacgaaggcgacgaatctcgtgctcgcgggcgcgaagctcatcggcgcgaactccgacacctgcggcccgacggacgagggcatcgcccccgcgtgccgcgcgctgatcgccccggtcgagatcgccaccggcaagcaggcgtatttctgtggcaagccgaacccgctcatgatgcgcaccggcctgcgcatgctcggctgccactcgggcgaggctgtcatgatcggcgaccgcatggacaccgacgtcatctccggcatggagagcggcatgtccaccgtgctcgtgctcagcggcgtgtccacgcgcgcaacattggacgagtttgcctgccggccgagcgttgtgctcgacggcgtgggggatatcccgcggctggcgcagcaggggtga

SEQ ID NO: 2151 - DNA, 3465 bp, Unknown
  Unknown gut bacteria
atggcattgcagttttattttggcccttccggaagtggaaagagccacaggcttcacagagatatcatcacatgggcggaaaaggagccgggacgcagctttctgtttctggttcccgatcagtttaccatgcagacccagcttgacctggtgaatgccagtaagaaaaaggggatcatgaacattgatgtattgagctttgggagactggcccacaggatttttgaggaaaccggttttacaacggaaacggtactggatgatacaggaaagagtctgatcctaaggaggatcgccgaaaagcacagggaaaatttaagcgtgatcggaaagaatctgaacaggatcggctatatccatgaggtaaagtcagccctgtcagagttcatgcagtacggtctgacaccggaggatgtggacggacttgccggatttgcaggaagaagaggaaccctttccgggaagctgaaggacttaagtgagctttaccgggcttttcttgcctgtaaggaaggaaaattcataacgacagaagaaacgctggagcttctgacaagggcagtggagcagtcagccattatcagggacagtgtgatcatatttgatggctttacaggctttacaccgatccagaaccggctgatccagcgtctgatggagctgaccgaaagagtcatcgtttccataacaatcgatattcatgatgatccctacaaaatggcaggggatcaggagctgttttatctaagcaaaaagacggtccgggatctttgcaggctggcagaggaagccagtgtagagaagatggaggatgtctatctgaaggaagagccggtatatcgttttttacagaacccggcactggcacatctggagaagagtttgttccggtatccttttgccccttttgcaggagaaacgaaagcgctgcagctctcagaatgtctttctccggcaggtgaagcaagagctgtggctgaaaaaatccgtgagctggtactttctaaagggtacagctaccgggatattgccgttattgttggagatatggaaacctatggagattatctggaacgggaaggggaacggtatgagatccctatgttcatggacaggacaaggggacttctgctgaatccctttattgaatttataaggagcagcctgaaaatggtgctgacgaacttttcctatgaatcagtattccattatctgcggagcggactggcaggttttgaggaggaagaggtcgacaggctggaaaattatgtagtttccctgggaatacggggaaggaagagctatcaggaggtctttgtcagaaaaggaaaagggataccagaagaaaaacaggcgttatttctagctggactgaatgcaacaagagaaaaactgatgctgcagatgatgcccctgcttgaaaagcacagaagtgccggggaatatgtcagaatgctgtatgattttattgtgcaggcagatatggcagcaaagctggcgtcctatgagcagtggttccaggagaatggaagaccggaaaaggcacgggaatatgcccaggtataccggtttgtcatggagcttttagagcagatcgaggcgcttctaaaggatgaggaaatgtctttgcaggaatttgcggatattctggatgccggctttgccgagatcgagatcgggatcattccgggcagtgtggacagggttgtcgtgggggatacccagaggacccggctgaagcaggtgaagattctgtttttccttggcgtaaatgatggaaatattccaaagagtggtcagggagggggtatcatttccgatattgaccgggaattcctgcagacctccggcattgagctggcgcctacaccaaggcaggaaatgtatatccagagactgtatctttatatgaatctgacgaagccatcagagcggctgtatctgtcctatgcacgctgtggcagtgacggaaagagtatcaggccttcctatctgatctccctgatcgagaggatatttccgggtattcataaggaatatccggacatggttacttcagtgacagaaagactctgcggaccaagggacggactgcttctgctggcagaaggcctgcaggcatacagggagggaagacgggagcatgaaaaggaaacagcagcacttctgaagctgtaccggcagagtgaggattacagagagcttgcagaagagatgacagaagcagcctttgcaggatactcgcattcaccgctctctgaacaggtggccagagaaatttacggcactatgctgcagaacagtatcagccgtctggagcggtatgcagcgtgtgcctattcccatttcctgcagtatgggctgcagctaagggagcgggaggaatacagctttgaaccggcagaccttggaaatatatatcatatggtgctggagcgttttgcaggaaaacttgcagagcatggaaaaacctggttcaattttgatgaaacagaagcagatgcctggctacaggcgtctctgctggagagcacaacctcttatggagaaacgattctttacagtaacgcccgttatgaatatatgacggaacggatcctccggattttgaggagaacggtcaggacattgaagacacagcttcttggtggtgcctttgtgccttctcattttgaaatgtcatttcagagagtagaggatctgaatgccgtaaatattgccctgtcagagcacgaaaagatgaagctgaagggaagaatcgaccggatcgatacctttgaggatgaggagcatgtttatgtaaaggtgatcgattataagtccggaaacaaaaaatttgatctggcagccctgtattacggactgcagctccagcttgttgtttacatgaatgttgctgtggaaatggagaaaaggaggaatccggggaaggaggtagtaccggcagcccttctttactatcatgtggctgaccccctggttaaggaggaaaaggagctgtcgccggaggaaataaatgaccggatgctgaaggagctgcggacaacaggaattgtcagtgcggaggaaccggtggtgagccttcttgacagaaccctgtcaggaaaatccctgctgatcccggtagagcggaaaaaggacggcagcttctctgcctcctccagtgtggtatcaaaggaggattacgaggtgatctccggttatgtaaatgagaagatcagacagtttgggcgggagatcctttccgggaatatggctgtcagtccctgcgaaatgggacagggaacagcgtgtacgtactgcgcttacaggagtgtctgcagctttgatgagaagctgccgggctatcaggtcagggagctgaaggatgagggcagagatgccattatggaaaaaatgagggaagctatgatgcaggaaaaagccggagacagatccgggaagggaggagagcaatggcagtaa

SEQ ID NO: 2152 - DNA, 3117 bp, Unknown
  Unknown gut bacteria
atgagcatgaatattatctttaacgggacaggacaggatcccaaggcctatttgaataaagacagggcgacaacaggatatcagaaggctgacagtaccagagaggtatgttcggccgggtttgcattagacatttctggcacagttacggataacagcgcttacgcaggtcacggaaggaccgcagaagaggttatgcagaaagcgggtatggaggatattactgcccgcaggaactatatggcagtgatgtctaattctgtatctgacgaagattttgcgaagcttcaggaagaaggctttcatccgggcagtacagagatcgatacggttgtcaccattgttgacaagataaaagcagctctgttaaagggaggtacacaggttgttggttatactgataccatagacggtgaaagccttgctagaatcacaggaagtgagagctttgccagagagctgcagaagcagttcgcagagcaggacattcctctgacagaggggaatatagaggagactgtaacgacctatgagcagctgtcctccgtttccgctctgaatgaggacaccatacggtatctggtagaaaatcagcttgacattactccggagaacatttactttgccattcatgcaggagcagcaggaagcggcaggactggacagggatactacagagccggtgaaatggatggctattatgtaaagaaaccggaaaccgtggagtatgaaagtctcatgcctcagattgaacaggtgatacaggaagcagggctttctgttgatgaagaatctgtttccgatgccaaatggctgattgaaagggggataccctttaacacagataatctgacaaagctgcatgagctggagaaaatgacgtttcccgtttcggaagaggattttctgaaagcggcggcaatcgccatttctgatggaagggcagtgcgcaatgctgatctgactgcgaaggagagccttctgcagcaggcagtaagaatagaggaaggtacgaaggagctgacagaccgggacgcagacaggatcctgatatcagagcttccttttcagctgaagaatctgtttgcaatccatgcagagagcacaggcttggaagagactgcagatcagagcagcagtgattctctgcagggagcaggcatgagtgcagacaggctgcaggccagaaggtatcttgaagaggtacggctttccatgacagtcagtgccaatttaaagcttttaaggagcggcttccagattgagacagctccgatggaagaattgatccgcaggctgtcagaagcagggatacaggtggatagagagcttacaggagaaactgatccggtaagagcacaggaaaaggcaggctggtacagagattccctgcaggcagcagaaagcctgaggagagctccggcagcagtggccgcgcagatcgagtcagctgatacactggagggagctgcacagaagagcaaagctgtccgtatctccatggaaaaagccggtgagaagtacgaagagctgatgacaactccaagaaaggatcttggagattccataaaaaaagcattccagaatgtagatgatatcctggcggatatgggtaaggagctgacagaagaaaacaggaaaacgatcaggatccttggctataacagcatggatatgacagaaaagaactttgaaaggatccgggcatcagaaaaactgctgcagaatattacagacaatctaagaccgggagaggttctttccatgatcaggaaggggatcaatcctcttactatgacgctggaggatctttatacctatctgacggggcaggagcagatgcctgaagaggagcttgcctcctacagtgaatttctttatcacctggatcagaaaaaggaaatcagtcaggaagagagagatgcttatatcggtatttacaggcttttccgtcagattgaaaaaggggatgatgcagcactgggcgctgtggcagatactggcaggtcagaaacccttgaaaatcttttatcagctgtgagaacggcgaagaagaagcatatggattataaaatcggtgatgggaaagaggttatcgaagcaggtgaccttacagattccatcattgcgcagatcgagcgggggtttatccatacaagaaaagaaatgcaccaggcattcacagagaatgatgatccggcggcagatgagctggcagaagggaaaacggctgaaggagaaatggctggaggggcagagaatttccgtgcagcggccgccagcgaagaagagattttccgatatctttcagacaatggacagcctatcacggcagataatctgctggtggcaggagaattgctgcggacacctgcagaactgttcaagggtatcaggggttttgaaagaggagctcagacagctggtaaagcgaagaaggatcatgcagacaggacagccagggagccatcagacgaagctggtacagacaggatcagtatagaagaccttggagaagagctattatccggatttacgacacaggagagtgcaggtaaggcttatgaccgcctggcagatgttctgtcagagcagattgaaagacaggcctttgagaacacaacagatatcctggacgtaagatatctgcacagtctttgcagacaggtaggctttctgagatctatggccaaagaagaaaattatactctgccgcttcagataaatggagagctgacagcggtaaatctgactatgatccataaggagggggcggaaagtaaggttactatctctctggaaacggaagcgcttggaaagaatgcagcggagttttcctttggaaagatgggacttacaggctgcagcatcagtcaggaaagacgtgctgcagagaagctttccggagaggctgagcttttccggcaaatgctctctgaggaagagatccgggcaggagacattcacttcattacagaagaaaccctggatcctgccggttatgcgttaaaggccggatctggtaaggaaaaaggacagacggatgcagccctgtaccgggttgccagaacatatatcagttttatcagacagataagcagaaaggaatcagaataa

SEQ ID NO: 2153 - DNA, 3303 bp, Unknown
  Unknown gut bacteria
cttggctgtgaggtctatgtggcacccaattcccgttttgataaggagctgactggaggggatgacagatattatcatttggtgctccttgcagaaaacaataccggctataataatctgaccaggatcgtaagccgtggatttaccgaggggtattactataagcccagggtagatatggagctgctacaggaattccatgaaggcatcatagccctttctgcctgtctggcaggagaggtacagcgctatatcaccaaagggctttatgatgaggcaaagaagacggcactgaagtatcaggcatgctttggcaagggcaattattttctggagctgcaggatcacggactgccggagcagaagatggtcaatacggcgctgctgcagatgagtaaggagctggatattccgctggtagcgaccaatgatgtgcattatacctataaggaggatgtaaagccacacgatatcctgctttgcctccagaccggcaagaagctggcagatgaagacagaatgcgttacgtgggcggtcagtactatgtgaagagtgaagaggagatgaaggctcttttcccttatgcatgggaagccgtggagaatacccagaggattgcggacagatgtaacgtggagatcgagtttggcgtgaccaagctgcctcattttgaagtgccggagggatatgattcctggacttatctaaacaagctctgcagggacggactgaaggagcgttatggggatgagaatgcaccagccgggaaaacgggacagaccttaagagaacgccttgattatgagctttctgttatcaagactatggggtacgtggattatttcctgatcgtgtgggattttatcaattatgccaagtccaatcagatcatggtgggaccggggcgtggttctgcggcgggaagtattgtttcctatacgctgaagatcacggatattgacccgatcaagtataatctgctgtttgaacgcttcctgaacccggagcgtgtgtccatgcccgatattgatattgttttctgcttcgaaagaagacaggaggttattgactatgtcagccgcaaatatggcaaggaaaaggtggtccagatcgtaaccttcggtacactggcggcaaagggtgtgatccgtgatgtgggaagagtgatggatcttccttataattatgtagacagtcttgccaagatgatcccgcaggagctgaatatcaccattgataaggcactgcagatgaatccggagctgcggggactgtatgagagtgatcccaaggtgaaggaactgatcgatatgagcaagcgtcttgagggtctgccaaggcacacatccatgcatgcagccggtgtcgtgatctgttccagacccgcagaggagctggtaccgctttcgagaggtgccgatggttcgatcacgacccagtttaccatgacgaccattgaagagctggggcttctgaaaatggattttctgggactccgtaccctgactgtgatccgggatgcggtagcccttgtgaagaagagtaagggcgtttctgttaatatcgatcagatcgattacgatgataaaaaggtgtttgcatctctttccacgggaaagacggacggtgtgttccagctggaaagcgggggcatgaaaaacttcatgaaggagcttaagccggagaatctggaggatgtgatcgcgggaatttccctgtatcgtccgggccccatggactttattccaaagtacatcaaaggtaaaaacagtgaaggatctatcgtgtacagctgtccgcagcttaagccgatcctggcaccgacctatggctgtatcgtatatcaggagcaggttatgccgatagtgaggggtcttgggggctatacccttggacgaagcgatctggtgcggcgtgccatgagtaagaagaaacaggcggtcatggaaaaggagcgtgctaacttcatttacggaaatgaagaggagggtgtgcccggctgtgtggcaaagggtatttcagagcaggtggcttccggaatctatgatgacatgatggatttcgccaaatatgcatttaacaagtcccatgcggcctgttatgcggtggttgcctatcagacagcttacctgaaatattactatccggtagaatttatggcggcgcttatgacttctgtgattgataatcccggaaaggtggcagaatatattatggtgtgccgcagtatggggatcagcatcctgccgcctgacatcaatcagggagaaagcggcttttctgtaaaggacagatccatccgctatgcactgacagcaatcaagagcgtgggacggcctgtgatcgaagctgttgtgaaggagcggaatgagcacggtgaattcctgaatctgaaggattttatcagccgtatgtccgataaggagatcaacaaaaaggcgattgagaactttatcaaggccggggcttttgacagtctgcccggtaccagaaaacagtttatggtagcttacggaaagatcatggatcatatcgtgaaggaccggaagaacaacatggcaggacagatgagtctttttgacctggtttccacagaagaaaaggaggagtttgatatccgccttcctgatgttggggagtatccaaaggagatgctccttgcctttgaaaaggaggtgcttggtgtctatgtcagcgggcatccgcttgaagaacaggaggagctctggaaaaaagggatcaccaataccacagcagactttgtactgaatgaggaaacgggtattccgatagtgaaggatggtgacagcgccacgatcggcggcctgatcgcagatagaaagatcaagtatacaaagaatgacaagatcatggcatttctgcagatcgaggatctgcttggcagcgtggaggtcattgtttttccaagggactatgaaaaatacaacagcaggcttgtagaagatggtaaggtctttattaaaggtcgtgtatctcttgaggaggaccgggatggcaagctgatctgtgaaaggatcacttcctttgatgaaatcccaaagaagctatggatccgattccccactatcgaggcatatgaagcagggatcgaggatcttttaagggatatctcggagtcagaagggaatgacagtgttgttctttatatagaagataaaaagcagatgaaaaaactgcctccgggaagaaacgtaaatgcagatgaggctctttatgatgccttatgtaaaaagtatggaaaagataacataaaaatagcatgggacgtgaaaaaagattga

SEQ ID NO: 2154 - DNA, 2742 bp, Unknown
  Unknown gut bacteria
atgaataatcagaagaaaacaggtaagtggatcagatatgcaacagcctttgtcctccttctctgcttctgtctgattcagccagtatttggaactattgcagatgccagagagatcacttcagcgaacccggatgtctctcccactccctttaacggcgtggatatctcttcagaatcagaggcttctgatctttccctggaggatgccatccatattacttcgctgaaggaatttcaggatatggccgaaagctgtgtgatcgattcctggtcaaagggaaaaatcttcgttctggacaatgatctggatttcagcactgccaccttcaccccggttccctcctttggcggtattttcatcggcaatggacataccatcaagggctttaccaatgatgcaggaagtgacaataccggcctcttccgttatcttcaggaaaatggtgagatctatgatctccgtgtcaacgcctctgctacagctaagagcagccatgacggtctttctctgcttgttggccataacaagggtatcatcagcggatgccatgctgccggtaatttaaatggcggtgatgatatcggtatgattgccggctataatgatgtcaccggtatcatcagtgaatgtctctctgagggtattgtttatggtaatcaccggatcggtgccatcgccgggactaacgccggctctattctgagctgtgttaaccgtgccagtgtcaataccactgtagaagaaggggatctcgatatttccctgctgactgttgatgatcttctctccactgaaaacgtaaccagtgtaacagatatcggtgggattaccggaagtaatacaggcatcatccgtgccagcgtcaataatggtgctgtcggatatcagcacgttgggtacaatgtcggtggaattgccggaagccagatgggctatatcgagggttgtatcaactacggtgtgcttcatgggcgtaaggatgtcggtgggattgccgggcagatggaacccagcagcgaaatgctttataacgaggatactcttgataagctgcataccgaactgaataagctgcatgatcttgttacaaagatgaatgatgatgccagcggtacctccacagacctgaatgctcagttaaataagctgcttgacgcagtggaatccacccagcgggctgctgatggtattgcaaatgaagccagcaatgacatgcgctcctttacttccgagctgacggatctgtcatccctgccgactccaaagccgatctcattagactttctggattccattcccactttaagtcccagtcccactgcgactccggaaggaaccccggatccgaatgccactccaaccgcgactccgactgccacacctaccgccacaccaactgcagcaccaactgtagcacctgctgcaacaccggttcagggcaacggtagaacccgtgcaggcagcattggtaacaatgacagtctggaaagcgaaacaggctcctacaccacggaaacaacaatgagccagcccgtacctgtcactgtcaggatgatggatcccggctctcctgctacaacacctactcctatagcaacccctacccccactgtgacaccagaacctactagaagtcccctggcatggccttcaggagtaccaaccattgatccttctgcacttcctcagatttcagactatagctttgacaaggatgcagcagaaagtgaactaaacaagctgcaggataacgtttataacagtacttcttcagcccttgacagcatgaagaataccctcagtaaccgtacttctattttcagctccaggatcgacagctggcataccgcattaagctccggcttttcttctattatttctgaaagccggacactgaataatatggtagatagcaaatcccagcttcttctggatgacttccaggctattacagatgagctaaatgtcattggcaatatcatcaccactgcagatgacgatgtgacagatcccgatgaacttgtgactgatatctctgatgaagataaggaaactgatattactggcaaggttatgaactgtcagaataaggggaagatttatggcgacctgaatgtaggtggaatcgccggctccatgtcacgtgaaaacgatctggatcccgaagacgatatcacacttaatactacatccatgaatttccgctatcagcagcgtatcgtcatccggaaatctgaaaacaaaggggtcatcaccggcaaaaaggactgcatcggtggtatcgtcggcaatatggtgcttggcagcgtcatttcctgtattggagacggcgatgttaccagtgaaggcggtgatatggtcggcggtatcgccggtttctctgattccacgatccgggaaagcagtgcaaaatgtgccctctccggtgaaaatcagattggtggaattgccggaagcggcaagtccatcaaaaactgctacagcatgattgaaatcaccgagggtaccaattatcttggttctattgctggtaaggctgatgtcaatgatgatatcagtgaaaactactttgttgaaggctgtcctgccggtattgatggaatcagctatgaagaaaaggcccagcctcttccctatggcagcttcctgtgctttgatgatcttcctgtcatctaccagaacattacactgacctttatggcagatgacagactggttacaacagtcaccctctcctag

SEQ ID NO: 2155 - DNA, 2715 bp, Unknown
  Unknown gut bacteria
atgtcgacagttgagtttgacaaaagaaagtacagtacagatagtgaatacatgatacagaacttcaaggagaagaaaaatctggagaaatggcagaagcttctgtgccagtcagtaaatgtatttgcatgctttgtagactgcgatgggactcctctcacagccctttccggcaatcctgatgaagcagcaaggctgatgaaggccattgatcaggaacagctgcagaatatgcttacgagagtatgtgaaagcacacttgaggatcaggcaattgaagagacagggtattccaacctgcgcatggcagtgatcactgccagggcgtttggaagacctgttcttaactgggtgatctttggtgtgctttctgatgactttgaggaagaagagaatgacaggccaggactgctcggctttgaatccatgatcacagcgagggcatttaaccgcgtgatcgatgccgtcagcgagttttcgagggatctggtcagcagtgcagcccatacgctgaatgcagaagcagagagccggagaagccagtattcggccaaggcactggaagccaacctgaaacgtacagaagcactggcagagatcatccagcttctggaaaatgatgatgcaattgagaaattaatgctccggatcctgcggacagtaggaagctttctggatttaagcacagcagctctgtgcagaaggacaaagcagagggatgagatcgatatcctgtcccactggtgtaaccagaaggaggtctggggactggaggcagatgcagctcagaaaaagcccttctttatcaaggatgatgataaggcttttattttatctgacagttcaggacttaagaaggaagaaagagaagagctggaaacatttgggatccatgcacttgtggtaattccaatcatgatccttggaaaggtcgatatgtatggcgttttcacggagaaaagggaggacaggatctggcagaaggaagagatcaagttcctggcggatgccatgaagatcctgcagagtatccttacaagaaggatccagaagaattcgctggcaggctcctatgcctgtctggaaactattcttgataatgtgggcggcgctgtttatgtcagggattttgaaacggggaatagcctgttcaccaaccggaatatgcgtggcattttcggtgaagaactgaaaaacggaaatatcaacaagctgcttgaaaagacgattgtggcggagaaaggaatcggggaactgttccttgaggatcccggcaagtggtttgaggtttattatacaaaaatgtgctgggtagatggaagaaatgtaatgctggttgccctgtacgatgagactgagaaaaaggtatatcagaagaaattggaacagcaggctcataccgattttctgacaggactttccaacagaatgtgctgtgaaagggatctggcaagatatgtggatgaagccggtaaaaagaagaaaaagggtgcgctcctttatcttgacctggatgatttcaagcatatcaatgacggactgggacatcagtatggtgatgtactgctaaaggcgatcgcacataattttcagaggatcaaaggaattgagaatacctgctaccgtatgggcggtgatgaatttgtcattattgtggcacctgagcattatcaggagcttaacaggatcatccaggaaatcaaagacatcttcatgaaaccctggtttttaaaggattcggattactactgcaccatgagtatgggtgtagtagagttccctgacaatggagaggtcgtccatgaactcatcaaaaaggcagatatcgccatgtatgagtccaagaaggcaggtaagaacagagtttccaattacacattggagattggcagtctatcaggaagaagactggatatggaaaagaatatgcgtgaggcgacagccaagggcaatcaggagtttgagatctttttccagccgatcatggatatcaggggtgagaagccgaagtgtacaggtgcagaggcactgatccggtggaacagtacggagcttggctttatttcaccggcagagtttattccgcttgcagagtatctgggactgatcaatccgatcgggaaccatatcctcagggaagcctgcaagatctgcagctactggaatcagaacggttacccggattataaggtgaatgtcaatctgtctgtcatccagcttttgcagagtgatattgttgaaattgtagaaagtgctattcatgacagtgggataagtccctgtaatctgacgctggaggtaacagagagccttgccatcaatgatattgacagaatgaagggaattcttggaaggatcaaggagcttggggtaaggatcgcattggatgattttggtacaggttattcttccctgaaccatatcagagagcttccgcttgatgtgatcaaagtggatcagagctttatcagaaatctggaaatggacgtatatgcaaagtcctttgtccgtatgatcgctgaactggcacaggtgatcggtgtaaacctctgtgtcgagggagtggaaacagaaggccagttctatatcgtatccaaaatgaatgtaggactgatccaggggtactattttgataagcccttaaaaagagaggatttcgaaaagaaatatgcacctgaccttccgaaaaatcagaagggaacaaagaaaaaatga

SEQ ID NO: 2156 - DNA, 1944 bp, Unknown
  Unknown gut bacteria
atggcagaagaaaagaattatcaggaagcctatgaaaaggaacatatcaagacagcagatctggcagagcgtgtggcggtactggaagcaaagaatgaagaattgaatttcaagctttcacggatcaaaaataatcccctctggaaagccagtgcaccgctcagacggggcatgcacttcgtgatccgccagcgggacaggctgaaaaactgcggaagtatcagaggtgtgcttgccaagctggattataagaagatagaacggaaggcaatggccagatatggaacagagagctttccggacgaagcaagggcaaaggaagagcgggagacggtctttgacaggatgataaagatcagtatcctggtacctctttataatacgccggaaccgttcctcagggatatgataacatctgttcttaatcagacctatcagaactgggagctttgtcttgctgacgggtcggatgcagagcacggggaggtaggaaggatctgcagggaatatctggaaaaggatagcaggatcgtttatcagaagcttttaaagaatgaagggatttccggaaataccaatgagtgcctgaagctggctacgggagaatatatcgggctgtttgaccatgatgatatcctgcatccaagtacgctgtacgaatatgtgaaggcggtcaacgagcaggatgccgattatatttactgcgatgaaaccacctttaaaaatggtgatatcaataaaatgctgaccatgcatttcaagccggattatgcggtggacaatctgcgggccaataattatatctgtcatttcagcgtgtttgctaagaggcttctggaaggggaggagctgttccgttcccggtttgacggaagtcaggatcacgatatgatccttcgtatgacagacagggcaaagcatatcgtgcatattccaaagcttttgtattactggagatgccatgagggcagtgtggcctccgggatcgacgcaaagccttatgtagtggctgcggcgaagggagctgtggcagaccatctgagacggcatggctttacccatttccagatcacctcgacaagggcttttgaaaccattttcaagatccgatatgaaattatcggagatcccatgatctccattgtgatcccgaacaaggatcacgcagcagacctgaagcgctgcattacttccattttggagaaatcgacctatgaaaattatgagatcgtgattgtggaaaatggcagtgagacgaaggagatctttgattattacacttctttaaaagaatatgacaatatccgtgtggttacctatgaaaagccggagggacagaatggatttaactattctgccgtaaataactttggggtaaagcagacaaagggagattatatcctccttttaaataatgatacagaggtcattaccgtcaactggatggaagagcttctgatgtatgcccagcgtgaggatgtgggggcggcaggggccaagctttattatggaaacaagacgatccagcatgccggtgtggtattgcagcttggtgcgcacagaaccgccggacacagccattacggccagagcagggagaacctgggctatatgggaaggctctgctatgcacagaatgtttctgctgtgacaggagcctgcctgcttgtgaaaaagagcctcttcgaggaagtgggaggtcttgatgaaagctttgccatttccctgaatgatgttgatttctgtttaaaactcagggagaagggactcttaaatgtatttactccttttgcggagctttatcattatgaatcggtatcaaggggcctggatgacagcggggagaaggcagagcgctataaccgggaatctgcacatttccgggaaaaatggaagactgtgctggaaaaaggagatccctattacaatcctaatttttcactt

SEQ ID NO: 2157 - DNA, 2655 bp, Unknown
  Unknown gut bacteria
atgaaacaattcacttcagatgaactgagaaatgcctggaagcagttttatattgaaagaggacatgtggatgtaggagcagtttccctggtatctgacgggtctaccggtgtacttttcaacgtagccggcatgcagcccctgatgccgtacctgcttggaaagaagcatcctcttggaacaagactttgtaacgtgcagggctgtgtccgtaccaatgatattgattccgtaggtgacaggagtcatgtaaccttctttgaaatgctgggaagctggagccttggcgattatttcaagaaggagcgttgccagtggagctttgaactgctgacacaggtattcggatttgatgcagaccatcttgcagccactgtatttgaaggtgatgagaacgcaccaagggatgaggaaggtgcaaagtaccgtatcgcttccggatttaaaaaagaaaatatttactatcttcctgcagaggataactggtggggactggaatacggaccctgcggtcctgacagtgagatgttctatattgcagacagaccggactgcggcccggactgcggacccggctgtgactgcggcaaatataccgagcttggtaatgatgtatttatgcagtatgagaagcaccatgacggacatctgacacccttaaagcagaaaaacgtagataccggctggggacttgagagaattcttgctttcctgaacggtacaagggatgtatacagaattgacctgtttgcacctgttattgcttatattgagcaggcttccggtacaaagtatgaggaagatgagaagctgaccagatccatgagaatcctggcagaccatctccgtaccagcgtgatgctgatcggagacgaagcgaagcttcttccctccaatgcaggtgctggctatgtgctgcgccgtctgatccgccgtgcggtaagacatggaagagtactgggactcagtacacagaatcttctgcatatagcagagatgtatattgatacgatctatgcagagagttatccgcttctgaagaagaacaaagagtttgtgctgacagagctgaagaaggagatcgaccgcttcgaaagcactgtagagaatggtatgaaggaattcaagaagatcctggagcagaagaaggaagcagactctggccagattgacggtaaatccgcattctatctctatgatacctttggattcccgatcgagcttacggtagagcttgccggtgaggaagggctctctgtagacgaggatggatttgcgaaagcaatggaagaacagaagcagaaggcaagagacaatcagaacttttcaacaaggctttctgctgataatggattatatgagaagttggatgccggtattgtgagcgaatttatcggttatgataccctgaaggcagaagagaccatcgcagcagtgaataatggcagcgagtgggaggattccttaaaagagggagaagagggaactgttattacagcaaagactcctttctatgcaaccatgggtggacagaagggtgactttggtgtgatcgtgacaaagaacggtaccttcgatgtgcaggaaacagtgaagcttcccggtggaaggataggacatatcggtaaggttgtttcaggaagcattgcaaagggagaaacagcaacgcttgaggtatctgccctgaacagaagcaatacctgtcgaaaccatacagcaacccatctgctgcaggaggcactccgtgaagtgcttggtgatcatgtagagcagtccggttcctatcaggacggcgaaagaacacgttttgacttcagccatggacaggctatgacggcagaagagataaagaaggttgaagcgatcgttaatgaaaagatcgcagaggatcttcctgtggaaacaaaggtgatgagccttgaggaagcaaagaagacaggagccatggcactctttggtgagaaatacggagataccgtaagagttgtcatgatcggtgatttctccagggaattatgtggtggtacccatgtaggacataccggagatatcgcatccttcaagatcctttctgagtccggtgtagctgcaggaatccggcgtatagaagcactcacaggcagaaatgtaactgcttactatcaggaaatggaagagaagctggcagaaacagccaggatcttaaaaacaactccggcctctcttactgagagagcagagcatctgatggctgaactgaaggctctgcagagtgaaaatgagtccttgaagagcaaggccgcaaaagaagcacttggcgatgtcatggaccaggttgtagaagtaaacggtgtgaagctgctggcaacaaaggtatcaggcgttgacatgaacggactgagagagctgggagaccagttaaaggccaagatcgcagagggcgtagttgttctgatgtctgatcttgacggtaaggtaaacatggttgccatggcaacagatggtgcgatgaagaagggtgcccatgcaggcaacctgatcaaaggaattgcagcactggttggcggtggcggcggtggacgtccgaatatggctcaggctggtggtaagaatcctgccggtattgatgaggctattaaaaagagtgctgaggttctgaaagaacagatcaaatga

SEQ ID NO: 2158 - DNA, 1824 bp, Unknown
  Unknown gut bacteria
atgatgaagaaaaaaagaaaagtgtcggatattcagtcggtcattatgacggtgctttccctgatgactgtgatcacatcggtatccatgggattattgctttataaccggtatgaaactgccatgcgccagaatgatgtccgggatgcgcagaatctgatggaaaccattgcaaattccatggaacagtatctgaagaatatgagacagatttctgataccgttaattacaatatcatacaggctcatgatgtatccagtccggagttcaatcagcagctcagccttctttatgatttaaataaggacaagatacagagtattgcgctttatgatatggacggggagctgcttggggcagagcctgttacgctccagaaggagggggtagaggtcagcaggcagtcctggtttgagaatgcgaaggaaaaaattgaaaatatgcatttttcaacacctcatatgcaggatctgtttcaggatgatgcaaagcggtatcactgggtgatctccctgagccgtgcagtggaagtgattgacggagacagtccggaaaatgggatcctgctggtggatatgaagtattcctttatagaggaaatgatggatcagattaatgacagaagcagagggcgatattattatctgtgtgacagggaaggaaagctgatctatcatccgtatgccaacgagatcagtaacggcctgtttcaggaaaattccggtctggcaagctgcagtgaggacggcatatacagaaatctgcgtagtccgcatggagagaagcagactatgatagtcaataccatttcctataccggatggaagctggtgggtgttgtcctgcctgatatccggacagacagccttgaaaaattccggatttatatgatcactattgtgatcatgctgatcatgatgctgcttgttgttaaccgtatcgtgtcaaaaaggatctccagtccgatcctgaagctggatgcttctgtaacggcatacgaagcgggagaaaagccggatatttacatcggaggctcttacgagatcaggcatctgggagattctgtccagaaatcatatgaagagattgaacggctgatgaaggaaattgtggaacagcagaatgagcgcagaaagagtgagctggcagtgctgcaaagccagattaatccgcatttcctttataatacactggaatccattacttggatgattgagggaaaccggaatcaggatgcggttttcatgatctcagagctggcacagcttttccggatcagtctgtcaagggggaagacaattatccggatcggagacgagctgcagcattgcagaaattacatgaatattcaaaaataccgttacagggaacggtttgtaaccgaatatgatgtttccgaggagatttatccgttctgtacggtaaagcttatcctgcagccgattctggaaaatgccatatattatggagtcggggatatggacgaggatgaccatcccagaattcttgtaagaggctttaagaaggatgaggatatttatctgatggtttccgacaatggaatgggaatgcggcgtgaggatgtggaaaatattctgacggataatcagaaggtgccaaagcatggctcgggagtagggcttattaatgtacacacccgtatacagctgatgtttggagccggatatggactcgcggtagaaagcgagccggatgaaggaactacggttaccattcacctgccggctataccgtataccaaagaaaactgtgagctgctggaaacaccgggaaaaccatccagaaatgaaggtgaagcatga

SEQ ID NO: 2159 - DNA, 2073 bp, Unknown
  Unknown gut bacteria
atggatgttaatcagtaccttggtattttcctggatgaatcaagagagcatctggaaagcctgaacacacagatcatgaatctggagcagaacccggaggatgcagatacgatcaatgagatcttccgtgcagcacattccctgaagggaatggcaggcaccatgggttataagaggatgcagaatttgactcatgatatggagaatgtttttacagagatcagaaacggatccctgaaggtcaattccaacctgatagatattctgttccagtgtctggatgcgctggacgagtataccaataatattcaggaaacatcagatgaggggacgaatgataacaagcctcttatagaacagctgaatgcgttcctgaaggagggcaaatctgatgcccagatggaagagcagaagaaggaaacgaaggaagaggcgacaaaggcagaagagggtaccggccgcagctgggagcagatctcacttggagatccggaaaagcatgtgattgccacggcaaaggaacagggaaagcaggtctatggtctgacgatccgtatacaggaaacctgtatcctaaaggctgcaagagcatttcttgtttataaggcagtggaggaaaaggcagagatcattgtctgcaatccttctgcgcaggatatagaggatgaaaagtttgacctggagttcagcctgatcataatctccgaccagccgcttgaagagatcatcaaggctgcggagaatgtatccgagattgcttctgttgtcggcgatgtgatcaatattgatacatcagtgaaagaggagccggaggaaaaaccggctgtagtggcaggaaagccggaaaccaagcctgcagcggcaccacagaacagtgcaccagttaagcagcagacagataaaaagggtggaaagccggtagtgaacaggactgtccgcgttgatattgagaagctggatgtgctgatgaaccttgtcagtgagctgatcatagccaaaaactcactggtatctgcttccagcacagaaggagcgacaggtgcaggctttaatgagcagattgaatatctggagagtgtaaccacgaacctgcatgagtctgtcatgaaggtccggatggttcccattgaaagcgtagtcagcaagttcccgagaatgatccgtgagctgtccaagaagctggataagaagatggaactgtacatgacaggtgaggaaacagagctggatcgtactgtggtggatgagatcggggatcctctgatgcatctgctccgtaacagcgcggatcatggactggaatcagcagaggtacgtgcaaagagaggaaagccggaggttggttctattttcctggatgcttatcaggatggcaacaatgtagtcatcgaagtaagagatgacggtaatggtattgatacagaggctgtcaaacagaaggcgatcgaaagaggagtgatcacaccggagcaggccgatagcatgagcgagaaggatatcattggattgcttttccatgcaggcttttctacatcccagaaggtcaccgatatatctggaagaggtgtcgggcttgatgtcgtgaagtccaagatcgaatccttaagcggtgaggtagaggtaaaatccaagcttggagaaggaagcacatggatcatcagactgccgctgacccttgctatcatccaggcactgatggttattgtcggtggtgagaagtatgcgatctctctaggcagtatccagacaattgaggacatcaatccggctgagatcaagctggttggaaataacgaagtgatcaacctgagaggaaatgtgatcccgcttgtcagactgagcaaagaacttgatattgagagtcagaagtctccggaagaaaatatggtagtcgttattgtgaagaagggcgagaagctggcggggctggttgtggatgagctgatcggacagcaggagatcgttattaaatcacttggcaaatatattaacaagtgcaagatcatcagcggtgcaaccattctcggtgacggcgaggtagcactgattttggatgccaatgcactcatttag

SEQ ID NO: 2160 - DNA, 1620 bp, Unknown
  Unknown gut bacteria
atggaaaaatatattggaaaatccgtatataagggaatcgcaatcggtcctgtccatgttctgaagaaaagagatcacctcgtcaaaagaatacatgtagatcatgtggaaaaagagctggagcgtcttgagaaggccaaggagcaggcgataggccagcttggggagctgtatgagaaggccatgcaggaggtcggagaggtcaatgcggcaatcttcgaggttcatcagatgatgcttgaggatgatgattatcaggatgccatacacaatctgatccagaatgaggaagtgaatgcggagtatgcagtagcagttaccggtgataattttgccgaaatgtttgccaacatggatgatgagtatatgcaggcacgctcggcggatgtcagggatatttcgaaccggctggtccgtaaccttgccggagaggaacagatggactggagtaagctggaaccgtccattattgttgcggatgatctgacgccgagggaaacggtacagatggataagaataagatccttgcttttgtcaccgttcacggctctactaattcgcacactgcgattcttgcccgtatgatgaatatcccggcgctgatcggtgtgccgcttgagctggagaagcttcataatggaaccatagctgttgtggatggtaaaaagggcgcctttttccttgatccggatgagaatgaaatccatctggcagaggtacagcagctggaggaacaggagcagaagcgtcttttagagaattataagggcagggaatccgttacgaaaagcggaaagaaaatccatgtctttgcaaatatcggaagcgtctcggatgtggcttatgtgcttgagaatgatgctgagggtatcgggttattccggagtgagttcctgtatcttggaagatccgggcttccggatgagaatgagcagttcaacgcttatcgccaggtattgcagatgatggccggaaagaaggttgtcataaggacattggatataggggcagataagaacgtggattatcttggactgggacaggaagataacccggccatgggatatcgcgcgatccggatctgtctggagcagccggatatttttaaaacacagctgagagctcttctgcgggctgctaaatatggaaatctcgcgatcatgtatccgatgatcatttcggtagaagaggttaagagtattggagaaattgttaaggaggtggcaagggagctggatgaagaaaaggttccgtacaccattccggagcaggggatcatggtggagacaccagcagcagtcatgatgagtgaagagcttgcggagcttgtggacttcttcagtatcggaaccaatgatctgacccagtatacactagcgatcgaccggcagaacagtaagctggaccggttctataatccgcatcatgaggcggttctccggatgatacagaagacgattgatggagcccataagcatggtaagtgggtcggcatctgcggagagcttggagcagatacagcacttacagagcggtttgtacagatggggattgacgagctgagtgttgcaccgtcgatggtgcttccggttcgtagtaaaatatgtgaaatggagtaa

SEQ ID NO: 2161 - DNA, 3108 bp, Unknown
  Unknown gut bacteria
atgtcttctattaacgagaaatccggttttgaatttgtgtttcagcctgtaacgaagctgttcgaggaacaggtacgtctgcacccggacaaatgtgcggtcgcatccagtaaagaacgctttacctatgcccagctgaatgaaagagcaaataaaatcgcccattctctcattgaaaaaggggttcaacgagagacgatcgttggggtagtactggagcgctgctgcgatttttatgcagtacgacagggaattctgaagtccggaggtgcgtttgcagtagcctccccggattatccggatgacaggatccagtttatctttgaggatgccggagtgccctttgtgatcacaacaaaggaaatcgcagaggaacgtaaagagctgtttgaaaagcttccctgcatcgtggttctgcttgaagaactgctggcaaatccgaatacagcaaatccggatacagagattggcgaacatgatctttgttattgtatttatacatccgggtctaccggaaagcctaagggggttatgatcgagcatctgaatcttgctaatttcgtaaaccctaatccgaaaaatgcagaaacctacgggtatgtgagcaggggaagtgtatcactttctatggcagcgatgacatttgatgtttctgtactggaagagtttattccgctgacaaacggactgactgcagtgatcgcaagtgatgaagagatcctgaatccggtcatgcttggtgatctgatcgtagaaaataaggttgatatcatgacaacgacaccgacctatctgtccaacatgatcgatctgccacagcttaaggaagctgcttcccagatcagggtattcgacgtgggagcagaagcctttccaccggctctttatgataaaatacgtgcagtaaatccggatgcatatattatgaatggctatggtcctacagaaacaacgatcagctgtacgatgaaggtgatcactgacagcaaaaatattacgattggtgagccaaacggtaatgttcaggtatatgtggttgataaggataataagatccttccggacggagaaaccggcgagttggtagttgccggtcttggagtaggcagggggtatgtcaatctgcctgataaaacagcagccgttttcattacgctgaatggtgaaagagcatataaaaccggagatcttgcaagaattactccggaaggtgaaattgaattctttggaaggattgataaccagatcaagcttcgcggattacggattgagcttggtgagattgaagaggtcattaacagctttgagggaattattaccagtattacggtaccggtcgataataaatatctctgctgttattttatggcagaccgtaagattgatgccgatgagctttctacatatgcatcagaatcactggcgcattatatggtaccggatgttttcgtgcagatggaaaagatgccggtaacagcaaatggcaagattgataaaagtgcgctgccaaagcctgtttcacagccaaagaacttgaaagagccggaaacaccgatgcagaagaagatttttgagatcgtttccagtgtagtggaaaatgatttctttggaattgatacaagcttttataaagcgggattgtcttccatcagtgctatgaagctctgcgttctgatctccgatgagtttggcattacggtaaaaacaagcgatatccatgaaaacaatactgttgaaaaactggaaaactatgtcatgcttgcacccaagatcagaacctatgaaaagcgggaagtatatccgcttaccggttcccagaagggtatttttgcggagtgcagcaagaatccgcaaagaaccggatataacatcccgttcctgtttgaactggaaagctccgtggatgtacagaagctgtccagagccgtagaacagatggtaaaagcacattcctatctgcttactgaggtattcttaaacgataagggagagatggttcagcgtcctggtgaggagaacttcgtaccggaagttattgagacaacgaatgaacagtttgaagagctgaagaaggaactggtacgtccgtttaagctggaaaagggacgtttattccgtgcgcggatttatgttaccgaagataggaaatatctctttactgatttccatcatattattgcagacggaaattcctatgatatcatttttgaggatatcaaccgtgcttatgtaggagaaaagctggaaaaggagacatataccggatttgatgctgcccttgatgaagagcagcagatgcaggaaggaaaatataagaaagcagagaagtattatgacagtgtgttcggagaggtggaaaccgaatcccttccgcttccggatgtaaccggaaagaatcctgaaaagggatatctggagagaaagcttgccgttgcagaagacaagatcgtttcctgctgcgagaagcttggagtgacaccgaatattttattcactggtgtatttggtattctgatgtccagatattccaatgcagacgacagtctcttttccacgatttataacggaagaaatgattccagactggaaaatacagtctgcatgctggttaagacgcttccggtttattgcaggtttgagcagaagacgacgatccaggcctacatgacagagctttccgggcagctcctgtcctccatggcaaatgatattttcccgttttctgatatctgtgcaaaatatggattcaattccgatcttacctttgcttatcaggcagaattaagtgacgattacccgattggtgataccgttgcaaggggacatgatctttcccttgatatggcgaaaatgccgctgctcatccaggtaagagagtacaataatgaatatgtgcttacagcggaattccgcagtgacatgtacagtgatgcttttatagacggtatgctggacgcctatgaagcagctatggactctgtactgaaaaacaagtacgtttcagaggtttccattatttcagagaatgcagttaaaaagattgcagaattcaatgatactgcctgtgaatatgacaggacgaaaactatttccgacagatttgcggaa

SEQ ID NO: 2162 - DNA, 2151 bp, Unknown
  Unknown gut bacteria
atgttttttgatataaaccgcctgagaaaggcggagtatgaaacgcagtatattaatggaatgagacctgttttcaacaagaaggcactgttcagcgatacgacagaagattatgtgactccggcagaaccggagccatattcacatgtaatgatccgtttccggacagcggtaaataatgtagaccgaatctttcttgtacatggagaagcaaggcatctgatgatgcgggaatccaaggatgaatattttgaatacttttcctgtgaaatggaactggagaatacagagttttcttattatttcattgtagaagccggcaagctgaactgcttttatgatacgagaggtgtagtgaaggaagtgcggccagagtatcagttccgtatcattcccgggtttaagacaccggagtgggccaagggtgctgttatctatcagatctatgtagaccggttttataacggagatcctgccaatgatgtactcaccggggaatatcagtatatcggtgacaagacagtgaaggtggatgactgggagaaatatccggcagccatgggcgtccgtgaattttatggcggtgatctgcagggtgttcttgacaagatggattatctgcaggatctgggtattgatgttatttatttcaatcccctgtttgtgtccccgtccaaccacaaatacgatattcaggattatgactatattgatccccattttggcaggatcgtcagtgacgagggagagcttctttcccacgatcagagggagaaccgtttcgcatcccgttatattgaccgggtgacgaataaggctaatctggaagcaagtaatgccctgtttgcagagctggtggcagaagcacataagcgcggcataagggttattctggatggtgtgttcaatcattgcggttcctttaataaatggatggatagagagcgcatttacgagaatgccgaaggttatgaaaagggtgcctatattgaaaaggaaagtccctatcatagttacttcaaattccataatgacaatgcatggccctataatggcagctatgacggctggtgggggcatgacacactgccaaagctgaattatgaggattccagggagttatatgcttacattctccgtattgcggccaagtgggtagcacctccttacaacgcagatggatggaggctggatgtggcagcagatcttggctacagtccggaaaccaatcacaggttctggaaggacttccgcagggcggtaagagaggccaatcctgaggcaatcgtactggcagagcattacggaagtccgagggcatggctgaatggcaaggaatgggatacggttatgaactatgatgcctttatggagcccgtgacctggttccttacgggaatgcagaagcacagtgatgatttccgcggagatatgctgggaaatgcggataattttatcggggccatgaagcatcatatgtctgatttcacgacgccatctctgcagattgccatgaatgagctgtcaaaccatgatcattcacgttttctgacaagaacaaacaggagagtaggacgtaccaataatctgggaccgcaggcagcgaatgaaggaatcaataaggctgttatgcgggaagctgttgtcatgcagatgacatggcctggtgcgcctacaatttattatggagatgaagccggtgtctgtggctttaccgatcctgacaacagaagaacctatccctgggggaaagaagatcaggaaatgatccggtttcataaggaaatgatcaggattcataaggcatgccgggagctgctgacaggttctttgaagatcatgagcggagattataacctgatctcctatggacgtttcaacagacaggcacagaccattgtggtggtgaataataatgatcatgaggtgtccaaagatctgactgtatggtatcttggcattccaaaggaaagtaccatgaagtgtctgatacttacggagaaagatggttttagtacagaagaggtggaatatacggtatccggtggcaaggtatatctggtaatgccaccgatatcggctaacatcctcagacatgaaaaattcgggccttttcagaaaaagaaaaaaatcttttcttttgaggagtag

SEQ ID NO: 2163 - DNA, 1941 bp, Unknown
  Unknown gut bacteria
atggataacgaagaattaacagctatgaaaattgcggtcttgatcggtggtctgcgttttgacagtcagcgccgtattatgaatggaatattggaaaaggcggtctttgacgggacggatgtttttatttttacctgtgattcgtggacctattcttctccttattatactaaaggagaaactgctattttctcattgccggatctgaaagattacgacggtgtgatccttcatggtgacacagtatatgacaagagtgtcatatctgaactggtaaaaaagatcagggaagcaaggattccctgtatcagcctgaatgtaaaatatccgggaatgctttatatgggtatggataatgccaatggaatttacgggattgtggagcatcttctccaggtacatcgggcgaagcactttgcttttatatcaggaccggaagagaatatggattccacggagagatgggagagcttccggaaggcactggcggacaataagattcccttcgataaccgctatttttattacggtgattatcatcctgagagtgggaaaaaggcagttggatatttctacgacctgcctggagcatttccggatgctattgtggcggctaatgatgaaatggcattaggggctttttacaagctgaaggagctggggtatgaggtcccagagcaggtgctccttaccgggtatgataatgcgatcgttggcaggaaccattctccaaggatcaccagtgtggagagaccggagacagagcttggagcaaaggcatatgaaaagctcagggatgtaatccttgggaaagagggatcggaagaaacaaccctgaaaagtcatctgatctttaccgaaagctgtggctgccatgacagtgaagcagaaccggaggaaagcttccggatgaagatgatcacagacaagcttcatgtgacagagttttctgagatcgtgaaatcctcatcagcagattttaccggggcacccacctttgaacagctgctggcagagatacgcagatacattaaactgatcaatccgaatgagttctatatgtgtatgtgtgtggtggaggactcttaccagacagacagaaattatgagattacgggaaaaacacagatagaagcactgtcacaatatgcaccggaaatctgcattccgctgatctacaggcggggagaatttgagaattatggaagattcccggtagaaaagtttcttccggataaatacacagtagcaggaaaaggcaggttctacactgtagttccgctgcattatcaggatcgctgctatggttactgtgttatcggaaacagcagtctgatgatggacagcgagcttttccatttatttatcatgaatattaataatgccctggagaatttaagaaagcagtcaatgctgaattccatggtgcacagactgaaccggatgtggatctatgataccctgacagaagtatttaacagagcaggatttttcaagttcgcaccgaacctgatccgtgaggctatcgacaggaaagagaatctgtttattctgttcctggatctggatggacttaagagcgtcaatgacaggtatggtcatgacgaaggagatgcttttatcaaggcaatgggaatgatcctgcgtcagttacatggaaacggggaactggtgatgcgctatggtggtgatgagtttgtcgttatgtccaaaaattatacggatgagaaggcggcaggctatatccgcaggatcgaaagaagcattgatgaatataacatgacctccggcaaggagtataaactgggcgccagtatggggtacagtctggtagagccggaagaagacatgaagctggaggatctgatcgaagtagcagatcaggagatgtataaggtaaaaaaagccaaaaaggaaaggctgaaaaaccagcagccgtaa

SEQ ID NO: 2164 - DNA, 1572 bp, Unknown
  Unknown gut bacteria
atgctgcttgtggatgtcacaaagggcaaggtcattgatgataatgaactgaaagagagttatgcttccagacagccttatggtgagtggctggacagcaacctgatccatctgcgggatctgaagattccgaatgaaagagtaccggaatttgcatatgaagaaagacagcggatgcagaaggccttcggttatacctacgaagagttaaagacgagcattcttcccatggcaaagaacggagccgaggctattgcagccatgggagtggataccccgatcccggttctgagcaagaccaatcatcctcttttccattatttcaagcagaaatttgcgcaggtaaccaacccgcctattgatgcgatccgtgaggaagtggttacttcaacaactgtttacgtgggaaccgacggaaatatcctggaggaaaccccgaagaactgccacgtgatgcaggtaagcaatccgatcctgaccaataccgatctgatgaagatcaaggatataaatcaggaaggctttaaggcagaagtgataccgatcacctattataagaatacgagccttgagcgtgctattgacagactgttcgtagaggtggacagagcttacagggacggtgtgaacatcatgatcctgtctgacaggggcgtagatgaaaatcacgtggcaatcccgtctctgcttgccgtatcagctttgaacagacatctggtcgtaaccaagaaaaagaccagtgtagcgctgatcctggagtcaggagaaccaagggatgtgcatgattttgctaccctgcttggttatggtgcctgtgcgatcaatccttatcttgcacaggaatccatccgcgagctgatcgacagccatatgcttgacaaggattattatgcagccgttgatgattacaacaacgctattttacatggcattgtcaaaatcgcttccaaaatgggaatcagtacgatccagtcctatgaaggatcccagatctttgaagcaatcggtattgataaggatgttattaacaaatatttccctcatacggtatgccgtgtgggtggtattaccttaaaggatattgaaaaggaagtggatgcactgcattcacaggcttttgacccgctgggacttgcaaatgacctgacactgaacagtgtgggacatcacaagatgagaagtggtggtgacgagcatctgtacaatccggcaacgatccatatgctgcaggaatccacaaagcgtggtgattatcagatgttcaagcagtatacagcccttgtcaatgatgaggattcagtaaagaacctgcgtggcctgatggatttcaattatccggaaaaaggaatcccgatcgaggaagtagaaagtgtggattccattgtaaccagatttaagacaggagccatgagctatggttccatttccaaggaagcccatgagacactggcaattgcaatgaacaccattcacggacgttccaattccggtgaaggtggtgaggatctggagagactttctgtagggtctgatgggaagaacagatgctctgctatcaaacaggtagccagc

SEQ ID NO: 2165 - DNA, 1539 bp, Unknown
  Unknown gut bacteria
gtggttggtgatgatgatcagtctatctacaaattccggggagccaatatccgcaatatactggattttgaaaaatactatccggaagcagcagtgatccggcttgagcagaattaccgctctacccagaatgtgcttgatgcagcaaatgccgtgatccggaataatataggcagaaaggagaaagctctctggacagatcagggagctggagagaggatccatttccggcagtttgacaatgcctatgaagaggctgaatttgttgcagatgatgtggcaaggaagaagcggaatggcagctatcagtataaggactgcgcagtgctttaccgtaccaatgcgcaggcccgtcttctggaagagaggtttatcgtagaaggtattccctatgatgtggtaggcggtgtgaacttctattccagaaaagagatcaaggatcttctggcatatctgaagacgattgataatggacgggatgatctttccgtaaagcgtatcatcaatatcccgaagagagggatcggtgctgcgacgattgccaaagtacaggattatgcagatgaaaaagggatcagcttttatgatgcactgaagcaggcggatgagatcagcaccataggaagaagcggtgcaaagctgaggcccttcgtggatatgataaaggtgttccgcagtaagcttcaggtgtatacgctgacggatctgatcaaggatattattgaaacgacaggatatgtcagggatctggaggcagacagtgaggaagaggcacagacgaggattgaaaatatcgatgagctggtcagcaaggtggcatcctatgaagaaacccatgatgagccttctctgagtgagttcctggaggaagtggcgctggtggcggatattgatggtgtggatgaggatgatgacagagtccttctgatgacacttcacagtgccaaggggctggaattctcccaggtttacctgacaggcatggaggatggtctttttccgagctatatgagcatcgtagcagatggagatgctgagattgaagaggaaaggcggcttgcctatgtgggaataacaagggcaaagaaggagctgacaatctgctgtgctaaaatgagaatgatacggggcgagacgcagtataacgcagtgagccgctttgtgaaggagattccgccggagcttctggataaccggatgccaaagccggcctaccgggatgatgatctgctgcagccttcgaggacaaagcctgcagcggtgctgactaaaaagagaaccgctgcagaaaataaaccttatatcgcaagtgccggaaccaaaatgggaataagctcttttggatcacttggaatcactaagggaggaaatgctgcaggaaaaccggattatgatgcaggggacagggtttcccatatcaaatacggagatggaactgtgcttgctatggagccgggaccgagagattacaaggtaacggtagattttgatgaagccggacagaagatcatgtatgcaggatttgcaaaactcaaaaaa

SEQ ID NO: 2166 - DNA, 1689 bp, Unknown
  Unknown gut bacteria
atgaacacactggttattgtactggttgcaggcgtatgcctggctgcaggttatcttttctatggaagatggcttgcaaagacatgggggatcgatcccaatgccaaaactcctgccgtaacaaaggaagacggacaggactatgtacccacaaatggctggacagtatttgcccatcagttttcatccattgccggagctggccctgttacaggtgctattcaggcagctgtatttggatgggttcctgtgtttctctggatcgtccttggtggtattttctttggtgcagtcaccgattttggtgcgctgtatgcaagcgtcaagaacgaaggaaaatccatgggacttctgatcgaacagtatatcggaaaaacaggacgtaagctgttccttctgttctgttggttatttaccctgatcgttattgctgcatttgctgacatggttgcaggtacctttaatgcctataccgtagtggatggtgtatcacagctttctgacgctgcgaagaccaatggagcggccggaagcatttctctgctgtttattgtatttgcagttgtatttggtctgatccagaagaagttcaagctgacaggctggaagcaggttgtagtcggacttatatgtacagtggcagcttttgcaattggtatggcatgcccgatcacagcaaccaaggacacatggagttatcttacatttgcctatatctttctggcagcagtgcttccgatgtggcttttgatgcagccaagggattatatgacaacctttatgtttgcaggaatgatccttggagcagttatcggtctgctggttgcacatcctaaaatgaatctgccagcatttaccggatttcataatgatacactgggagatctgttcccgatcctgtttgtaactgttgcctgtggtgcagtttccggattccatagtctggtttcttcgggaacctcttccaagactatttccaatgaaaaggatatgctgaaggttggctatggtgctatgatactggaaagtctgctggcgattcttgctctctgtgtagcaggcgcagctgcagctgctgatggtactgcagcaagtggaacaccgttccagattttttcatcaggtgttgctggattttttgaaatgtttggtattcctgtatatgctgcacagtgctttatgacaatgtgcgtatccgcactggcactgacaagccttgattctgtagccagaatcggacgtatgtcattccaggagctgttcagtgtagatgatatggagcatgcggaaggctggagaaaggttttttgcaataaatatttcgcaacagtactgacacttgcctgtgggtttatcctgaccaagatcggatatgccaacatctggccactgtttggaagcgcaaaccagttactgagtgcattggtactgatcacactctgcgtattcctgaaggtaaccggaagaaagaacagaactctgttccctccactgatcatcatgctctgtgtaacctttactgcgctggttgaacgtacaataggtcttgtaaaggcatacagtgcaggaagtgcagtattcctggtagagggtctgcagctgatcatagcgatcctgctgatgatacttggtgttacgattgtggtacattcaggaaaagagcttgttaagaagaaagcagagaactga

SEQ ID NO: 2167 - DNA, 1671 bp, Unknown
  Unknown gut bacteria
cagatgtttaatattacctaccggagaagtctgaaccaggaggcggaaacaattctgaacgcagtagccgggtcttttgactcggctttttcaaatatttatgatgggatccgccaactggcagaggaagaaatcattcgcaaaaatctggaaaatggagatggagcaggaacctccgtataccgggagctgtacgcagtcagctccaaatacagtaagtacgcttatttttccatttatgatgcagaagggaacaagctggtttctgtgacggagaatacttatatcaaagaaaagctgccattagactggagcgtattatatgaagcaggacagaatccgggcaaagtggttgtacggaacgccagattatatgagggggagaaaagagttgagtttctcagggcagctatggcagtccgttcagaaaagggagaaatcacaggatatattgtagcaactgtaaatgacggactttttgataatatgaagtggggactcgtcagcgaggatcagggtgttatttatgctatggacagcttccaggagatggtatactgctcaacggattcctatgacgaagatgaaatgcgccggatcagacgggaaatgctccgggacgaggctgctgacagcgacagtcagaatgcctgcgtgagtgcagataagaaatatttttattacgtagattacgaagagacaagtggtctttatctgttttaccagcagccggttgcggcattaaatcagttaaaaaaccgtgcatttaccatagcagtgatgtcagcagctcttggacttataatctgtattttcttgtcaaaatcggtcagcagctttatttatcagccgattaagaggatgcaggatgcgatcgcagagatccggcagggaaatttcaaagcaaggatcaaggttgacagtcaggatgagcttgggcagctttcggagagctttaatatgatggctgagcatctgactgataacatggaacgtcttcttgccagagaaagggagctgagcgaggtacagatcaaaatgatgcaggcacagttgaatccacactttttgtataatacgctggataccatgaaatggctaggaaaggctaatcagatcccggagatcgccacgatatctgctgatcttgccaagatcctgcggatgagtatttctgcaagcccggaggtaccactggcgaaggaagtggaactggctgaggcatatgtccagattcaggaaatccgatttgcagataaatttgaatttattgtggatctgccggatgaactggcatctcttctggtgcctaagcagattctgcagccaatcatagagaatgcgatcatccatggtcttggaggaagagaaaatggaagggttatggtacaggcaagacagacaggggaagaaattcttaagatccggatccgtgatgacggtgttgggatgagcagggaacaggtgtggaagctgaatcactgcgaggaagatacttcagagcagcacagaatgggagaagaaagacacagtatcgggtattataatgtcaatgagatcataaggctgaattatggggatggttatggcttgtatacagagtctgaggaaggggtaggaacctgtatttacatgacattgccggtcagaaaaggggagaaggatgtataa

SEQ ID NO: 2168 - DNA, 2046 bp, Unknown
  Unknown gut bacteria
ccggaaatacagcggctgcctggtgggaacatctcctatatttaccatgcaagaccgggaatctggttatggatcgtcgcagagtggattcttttaatctatgtaactgttcttgcccacagaaaaatcggaacacagtatgagtacaggagaaagctgggtccgctgttacttgggatgctgcttgtttttgcaggaaatattgcctgtattacaccacttggaaaaaatctgccgctggatgcccttggcggggcgggaatggcgatttgcattttacatgttattttcacgcaatatttcttttcgatttcatcccgtttcattacgggagcggcttattttggagcgacagttgtagcatttatcccggtggtatggtttgggcgtattgctgatggcctgtttgacaagggcagtcctgatgagcagatagttatcatatttatcgtggcagaggggatatggtgtatcctgatttcagcgctggcaaggagctgggcagagcatatactgatcaggaaaaggaaatatattgttgacagtcttctggaatttcaggatagtgtcacttccattatgaataaagacaagctgtatcagatgatccgggagactgtaaatgcagcggtgaaggactgctgtgtacatattctggaggaaagggacggagtctttgcagaatacacagaaaatggaatggtgcccctggcgaaagaggtggaagcacagctggaacagttccttaacagcggcagtgcgtataaggatccggcatttgcggtctttaaatatgacgctaagatttacgggttcctatatgtagagctttgcaggaagaacagacttatttatgacgaaatagactgcatcaggcagatcggaaacagtgtatccagcgtgctgaagagtatcaatgcgtatgagaggctgtatcaggtatcgatccacgatggactgacaggcctgtataatagaaatttctgtcgtgagaatttgggaaagctggatatcacggcacgtcctgtcggtatgatctatatggatatggacaacttcaagttatataatgagctgtatggagaaagcataggagatcaggttttgtgctggtgtgcaaaacagctgcaggaggctgcagatgacagcatgaaggtattccgtgttggagccaatgagttcctgatcatcacagctgaagacaataaggacaagctgatctcattcgcaaagcagatccagaagatcatgctggagacaacggaggataagccgaaggtcattcagctgatcacgttcagcataggtattgcctgggataaatccatggcggaagatgcagatgagctggcccagcaggcgaagcgggcatcgttttatgccaagggaaatggaaaaaactgtattgaggtttatgaaaaggatctgaaggaaaaggatcaggagagtgaaggaagcgaaaagggatatagtcaggtatcaccgacgatctttgccctgatggcggcaatagatgccaaggattcctttaccttcgagcattctgaaaatgtttccagatatgcagaaaagctggcggcaaagctcgggcttccgaaggaggatatccagactgtaaaggtagcaggactgctccatgatattggcaagatcggtattcaggacagtatcctgaaaaagcagggtaagctcacagatgaggagtatagcataataaaaacacatgtagaaaagtctgttgagatgatccgcgttcttcctcatatggattatgtcattcctgcggttttgtcccatcatgaacggtatgatggaaaaggatatccgaatgggatccgtggaaatgagatccccatccttggaaggattcttacggtttgtgacagctttgatgccatggtctcccgaagagcctataaggaagctatgagtatagagtatgcgaccggggagctggaacgcggcaagggaacacagtttgatccagacgtggcacaggcatttattgaattaataagggagaatccttcgtttattgcacagtga

SEQ ID NO: 2169 - DNA, 1863 bp, Unknown
  Unknown gut bacteria
atgaaaaaccgaggtatcagaatttattttgtactcgtgatcggacttctgctcctggttctctgggccggcatgctgaatgtgaagcaaagcgagtataccaaaggggaactggtaaccagcctgaaggcagatgaagtaatttcggcaacaatcctgccaaaccgtgaaacaccgacaggtgaagtagagatcgtactggcaaacggtgaacagagaaccctttatgtaacagatgtaaatgagatcgaagctctgctggaatcatataagattgatccggctgtagaaaaggtgcgggaagaaaactggttcctgaacagtgtattcccggtgctccttgccgtgatcggtatggtgttcttctttgtgatgatgaataatcagaatgcaggcggcggaaacagcaagatgatgaatttcggaaagagccgggccagactttctcttggtgacaataagacgaccctgcaggatgtggcgggtctgaaggaagagaaggaggatctgggggagatcatagagtttttgaagaatccgggtaagtttaccagggttggtgccaggatccccaagggcgtactgcttgaaggagcacccggtacaggtaagaccctgcttgccaaagcaattgcgggagaagcaggagttccctttttcagcatatcgggatctgattttgtggaaatgtttgttggtgttggtgcatccagagtccgtgatttgtttgaagaagctaagaggcacgctccctgtattatttttatcgatgagatagatgcggttgcaagacgccgtggaactggtatgggtggcggtcatgatgaaagagaacagacattgaatcagctgcttgtagagatggatggctttggtgtgaatgaagggatcattgtgctggcagcaaccaatcgtgtagatatcctggatcctgccattttaagaccgggacgttttgaccggaagatcagtgtgaacagaccggatgtcggaggcagggaagagatcctgatggtacatgccaagaacagacctcttgcagaggatgtagacctgaagcaggtggcacagacgacagccggatttactggtgcagatctggagaatcttctgaatgaggcatccattatggcagccaaggaagaaagggcttttatcatccaggatgatattaaacgggctttcattaaagtaggaattggcgcagagaagaagagccgggtgatttcagacaaggaaaagaagatcacggcttatcatgaggcaggtcatgcgatcctgtttcatgtactgccggatgtgggacctgtctatacggtttctatcattccaaccggtaatggtgcagcgggttataccatgccgctgccggagaaggatgagatgtttatcacaaaggggcagcttctgcaggatattatggtgtctcttggaggacgtattgcagaggagattattttcggtgatattactacaggcgcttccagtgatatcaagaaggcaacctctgcagccagagatatggtgaccaggtatggtatgtctgagaatattggcgtgatcaattataacagcgatgatgatgaggtattcatcggaagagatctggctcatgcaaagaatcacagtgaactgatctcgggagaaattgacagagaagtaaaggccattattgatgactgctataagaaggcaaaggatattatattggcacacatggatgtactgcatcactgtgcagaactgttgatcgttaaggaaaagattggcagggaagagtttgaggcattgtttgaccagaaggagaatgatccggaaagctttttcgaaaaccatgaaattggtgaaagtgcacaaaaatga

SEQ ID NO: 2170 - DNA, 1908 bp, Unknown
  Unknown gut bacteria
atgaaaaagagtagagcaatcattgtgctgatcgttctggtgctgcttcttggcggtttcggatacacagcaacagaagggctcggaacagacagatccggttctgcatcagacattaagcttggtcttgatctggcaggcggtgtgagcatcacctatcaggcagtaggcgaagaaaagccgagcagcgaggatatggcagatacgatctacaagctgcagaagcgtgtagagaattacagtacagaagctgttgtgtatcaggagggggatgacaggatcaatatcgagatccccggtgtaacagatgccaatgccattctggcagagcttggcaaacccggttccctgtatttcatctacgaaacagatgaggatggcaatgccaactatcaggcaaccatggatgcaagcggcaatgtggtttatatgctgaccaaggatattgatacgatcgtggcagagggcagtgcacctctttccggtacggatgtcaaggatgcccaggcagcgactgctacagacaatatgaacaattctgaggttgttgttgatcttaccatgacaacggagggaaccaaaaagtttgcagatgcaactacaagagcatacaagaagggcgaaacgcttggtatctattatgatggacagatcatcagtgctccaagggtacaggcagccctgacagatggtaaggcgcagatcagtggtaactttgattatgaaagcgcagagcagcttgcgtccactatccgtatcggtggtctgaaggttgagctggaggagcttcattccaaggtggtaggtgcacagcttggtggagaagcaatcgctaccagcatcaaggcaggtctgatcggttttgctatcattgttgtattcatgatcgcgatttattacatttccggtgtggcagccagtcttgcactgacgctttatgtagagctgatcatcattcttctgaatggttttgatattacattaaccctgcccggtatcgcaggtattattctttcggtaggtatggcagtagatgccaacgttattatctttgccagaatccgcgaggagttggcagagggcagaacggtaaagacagcgatcgatattggcttcaagaaagctcagtctgctatcatcgatggaaatatcaccaccctgatcgctgcagcagtgctggcagtgatgggttccggtactgttaagggattcgcctatacactggcacttggtattgtattatccatgtttacagccatggtagtgactaagctgatcatgaaagcattctttgcccttgggcttacaaatccgaagctgtatggcgtagcaagagagagaaaggcagttcagttcacaaagaagaaggcagttttctttaccgcttcccttgccgtgatcattgcaggcttcgtctttatgggcgtgaataaggcacagacaggaaaccctctgaattacagccttgagttcgttggcggtacttctacaagtgttaccttcaatgaggatatgagccttgcagatattgattccagggtagttccgctgatcgaggatattaccggtgacggtaatgttcagacacagaagatcgatggaaccaatgaggttattttcaagacaagatccctgacacaggaagagcgtgagtcctttaaggatgccatgacagataattttgaggttgacggagagaagatcacagcggaaaccatcagctccaccatcagtaatgaaatgaagcaggaatccatcgtagctgtgctggtagcagcggtatttatgctgatctatgtatggctccgtttcaaggatgtacgttttggtgcaagctccgtactctgtctgctccatgatgtgctggttgtgctgaccttctatgcggtagcaaaggtatctgtaggt

SEQ ID NO: 2171 - DNA, 1305 bp, Unknown
  Unknown gut bacteria
atggatgaaaaaaaggtcgcaatacaggtaaaaggactggaaaaggcctataagctgtatgataagccttcagatcgtctgaaggaggctcttggatttggcagaaagaagcgctacaaggagcactatgccttaaagggcgtggatatgacgatctatcagggagagacggtgggaatcatcggaaccaatggctccggcaagtctacgatcctgaaaataataacgggtgttctgaatccaacaggaggatctgtccatgtgaatggaaggatctccgcactgctggagctgggtgccggctttaatatggaatataacgggattgaaaatatatatctgaacggtacgatgatcggcttctccaagaaggagatcgatgcaaagatggatgatattttaaattttgcagatattggggattatgtacatcagccggtcaaaacctattccagcggtatgtttgtacggctggcttttgctgtagccatcaatattgaaccggagatcctgattgtggatgaagcgctgtcggtaggagatgttttctttcaggcaaagtgctatcacaagtttgaggagttcaaggagatgggaaagaccatcgtttttgtcagccatgacttaagcagcatcagtaaatactgtgacagggttgtactgctgaaccagggcgtgaagcttggagaaggctcccccaaggaaatgatcgatgcttataaacaggtgctggtaggtcagtacgtaccggctgcagacgatcagagcctcctttctgataaggagatcaccgcagcagcggcagcggcggctggcacagtgaagggtgaagtgaatccggagctgctggaatacggaacgaaggacgccatgatcaccggatataaaataacagatgatatgggaagagagaccagtgcattgctgaagggaaaggaatgtacgatcaccatgcaggtgcattttgagcatgatatagaagctcctatttttgcctttacgatcaagaatattaagggtgtggagatcccaggaacccataccatggtggaaaaggcatttctttctccggtgagggcaggcagcgacatggagatcacctttacccagaagatcgacctgcagggaggagagtatcttctttcgtttggtgtgactggttttgaaaaggaagagtttcaggtatatcacagactgtatgatgtgataaacatgacggtgatctctgataaggatactgttggatactatgatatgaattccagagtcgttgtgaaggagctttcacagcaggaaaaggagtaa

SEQ ID NO: 2172 - DNA, 2214 bp, Unknown
  Unknown gut bacteria
atataccagaacagggaaaatggatatggagtactgagtgtaatagaagaggaagaggaggtcatatgtgttggattcttccggaatgtagaggcgggagaaacactggatatacagggaaattatgtggagcatcccatgtatggcatgcagatgaaggcagaaagctaccgggtggttccgcctgatgatgcgcttagtatggaacgctatctgggttctggagccatcaagggaataggggaggctcttgccaaaaggatagtgaaagcctttggaaaggacacattccgaattatagaagaagaaccggagagactttcggagatcaagggtatcagtgaaagaaaggcttcggagattgcagaccagatgatcgaaaagagggagttgcgccaggcctttgtttatctgcagcaatatggaatctccaatactctcgcagtgaagatttatgaaaaatatggctcggccatgtacggagtcatgaaggaaaatccgtataagctggcagaagatatcagtggagtgggattcaagattgcggacgagatcgcagccagactggggatctgtccggactctgattatcggatccggagcggcatcctttatgcactgatgcaggcggcggcagaaggacatacctatctgccgggggatctgcttgcggaacgcacggcggggcttcttggtattgggaaggaagcaatatggccgggaatcaataatctggctatggataaaaaactggtgatcaaaaccctcaaggaagaaaaaagagtatacgcaggagcctattactatgcagaactgaaatgcgcacgaatgctgcatgacctgaatatatcttttggggatgggctgacaggaaaagaagaaaaaagacttcttggtgttctggagcagatggaagaacaacaggggatattgttggatgaccttcagaaaaaagcagtgatcaccagtgccgttaatggtatcatgatcctttccggaggtcccggtacagggaaaacgacaacgatcaatacgatcatcaggctttttgaggcagagggaatggatattctgcttgcggcaccgacaggacgggctgccaagcgtatgacagaaactacagggtttgaggctaggacgattcacagattactggagatcaatggcactgtggaggaaggcaggggggcagaatttgaacggaatgaagaaaatccactggaagcagacgttattattatagatgaaatgtccatggtagatatccatcttttcaaagcactcctggaggcggtcagtgtgggaaccaggctgatcatggtgggggatgtgaaccagcttccaagtgtggggcctggacaggtgcttcatgatctgattgagagtgactgcttcccggtggttattctgcagaaaatcttccggcaggcgcaggaaagtgatattgttctgaatgcacacaggatcaatgccggggaaaggatcagctttgataataagagcagggacttctttcttctggagagaacagagcccggtgtgatctataagcacatgatacagctgatccgggagaagctgccaaggtatgtagatgcagatccatttgatatacaggtactgacacccatgagaaaagggagccttggagtggaaatcctgaatgggatactgcagaaatatctgaatccggaaagccctcagaaaaaagaatatcagaccggggaacgtctttttcgtgagggagataaggtgatgcagataaaaaataactatcagatcgcctgggaagtcagaagccgctacggaatccccgttgataaaggaatgggggtatttaatggagatatggggatcatcagggacatcagtgaaccagcacagaccatgacggtagagtatgatgaacatagactggtagaatatcctttttcccagctggacgagattgaactggcttatgctatcaccatccataaagcccagggaagtgaatatccggcggtcattctgccgctgcttacgggaccgaggcttcttcttaacagaaatctgctgtataccggagtgaccagagcaagaaagtgcgttaccatacttggcagcagcagactggtgcaggagatgatcgacaatgcaagagaaaacaggaggtataccagtctgaatgatagaatcagggaaatccagtgtgaagaaatggaaaaggactga

SEQ ID NO: 2173 - DNA, 2001 bp, Unknown
  Unknown gut bacteria
tccatttatgatgcactggttgtcatgagccaggagtttaaaaaggggctgccgcttattgatggacatggtaacttcggtaatatcgaaggagacggtgccgcagccatgcgttatacagaagcaaggcttgagagggtgacacaggaagcgtttctttctgatctcgataaggatgtcgttgattttgtgccaaactttgatgagacagagaaagaaccgtctgttctgccggtaaaattcccaaatctcctggtaaacggttctgaaggtattgctgttggtatggcgaccagtatcccgcctcataatctttcagaagtcattgatgctgtgaaggcatatatgaaagatgaatccgtttctacggcagaacttatgaagtacataaagggacctgattttccgaccggaggaatcgttatcaataaagacgagcttctgtccatttatgagacgggaaccggtaagatcaaggttcgtggaaaggtggatatcgaaaagggaaaagccggcagaaccaatgtggtcatttcagaaataccctatcccatgatcggtgccaatattgccaagttcctgatggatgtggcagctctttccgagcagaagaagactatggatatcgtggatatcaccaatcagtcttctaaagaaggaatccgtattgttatagaactgaaaaaagatgcggacgtggaaaactttgtaaatatgctttacaaaaagaccagactggaagatacatttggggtcaatatgctggcgattgccggaggtcggccggaaacgatgggccttaaggaaatcattaaatgtaatgtggatttccagtatgaggtcaataccagaaaatataccacacttcttgcaagagaacaggagaagaaggaaatacaggaaggtctcatcaaggcctgcaacgtcattgatctgatcattgagatcctgcgtggctccaaagacaggggcatggcaaaggcatgccttgtggaaggtaagacagagggtatcaaattcaagtttaaagagtcaaaaatcatggcatcacagcttatgtttacggagaagcaggcaaatgctatcctggaaatgcgcctttataagctgatcggcctggagctggaggcactgatcaatgagcatgaagagaccatggccaatatttatcgttatgaggacatcctttcccgtagggatgccatggcacaggttatcatgaatgaactggatgccattaagaaaagctttggacatgccagaaaaacacagattgaaaatcttgcagaagctgtttatgaagaaaagaaaccggaagagatggatgttgtcttcctgatggatcgctttggctatgccagatgtgttgacacagctacctatgaaagaaataaggaagctgctgacagcgagtcacggtatgtatttacctgtaagaatacgggcaaggtctgtgtatttaccaatacaggccagctccataccgtaaaggtagccgatattccctatggaaaattccgtgataagggagttccgatcgataatatcagtaacttcagttcggataaggaacatattattgctgttaccagtcagacgtcactgaatctgtatcgtgtgatcttcgttacgaagctttccatgatgaagatcgtcgatggtggcgaatttgatgtatcaaagagaatggttgcatccaccaagctgcaggagggagatgagatcgtggatgtatctgtactgaaggagcagaaggatattatactgcagacgaaagacggatatttcctgaaattttccctggaagaaataccggagaagaaaaagggagccgttggtgtcagaggcatgaagctgacaggtacggatcaggttgaaaacgtttattatacaagaccgggcatggcagatcctgtcatagaatttaaggaaaaacagtttgatctgtccaggatcaaaaccggcagacgggattcgaaaggaacgaaacccagagtataa

SEQ ID NO: 2174 - DNA, 2124 bp, Unknown
  Unknown gut bacteria
ggtgaaaagatacagataaaggatgccatcagccttgtcatggcctttggaagaaaggcatctctttcagaagagcagagagaaaaactggaaaactggagccttcaggtgagtgaagctcatggagaaggtgaaagcagccttctgacttatggagattacatagaactgacagccatatgggatcaggacagggagacagaaaacacagagaaggatccggaaaaggagctggatcagaaatacagaaaagaagatctgcttctgtttcaggattttacagaggggtatcagaaaaggctggaagcctttcagatccaggatcagatcgtaagggaaacactggagcttcttggaaagggatcagaggccagtgtcatagacagcagaggaaatacatacggatatgaaaatgtggaggtacctgtgtactgcgtggcggaagcctatgtggaaagaaatgaaggagaggatgacaggattcttgtcctgacagaaagaaagaagaattcctttaccctgaaaaatgcactgatcactgagaatgacgcagatggattttattttctgtggtccggcgaggaaatgtactgccctttgaaaaataatgagattttccaggagaaggttgcagatcttacctttgcagagggaaaagctcttgacagaaaaataaagaatgaaaaggtgggcggtgttctccttggagtggcagaagaaggtattgaactggaggacaggggctttttgccatttgcagaggattacagagtatatcagctatatggttcctgtaaagaatcagacaggacggagtttaagatcggatatgactttgctgattatgttatggataaggggaaggtctgtgcagttcttcttgtaaaggatcagaatatggaaaacatacgggtggctgtcagcgatcaggcttatgatgggatttatcatgaggaaataaagctgaaggcggactgtgagctgaaccttatctatggaagctacggggatagacaaagcagaaggatcccggcaggagaagaagtaatggtagacagtgacagcatgcttgtccagggagaccggcttatgatcgaaccttcagcagcctcttccaggattcaggtgctctccctgaaaagggcttatggcattccgtcctatagaggcaggatggagatcgtaaagaaggaacagggccttttgctgatcaatgagcttttgctggaagagtatctttattcagtagttccaagtgagatgccttcctcttatccggcagaggcacttgaggcgcaggctgtctgtgcaagaacctatgcctaccggtatcttctgaaatccggactcccggaggagggcgcccatgtggatgacagcgtacggtatcaggtttataacaatatcgaggagagcagaaatgccagaagagcggtgggagagactgccggagaaatgcttttttatgatggagtaccgatccatgcatattattattctacctcctgtgggagcggcagtgatgaaagagcctttggaagcacagaagacctgccctatctgaataccagacggatttcacatgaagaagaggaagaaggcctcagggaagaaagtgcgtttcaggatttcctgaaggaggagcaccccggggattatgaaaaagaggaggcctggtatcgctggcagtatgaggtacaggagatagatgctgcaaagatggcagagatcatgaaggaagctttttcagaaatctatgatatttctgttgagaagcggcttgagagcggtcttgccacagtgctttccgtaaaaacagatacaggtgattatgaggtaaagggagagtatcagatccggcaggtattatctcagggcggggaagtgatccgggcagatggatctgcggtaaccaccgggaagctgcttcccagtgcgtatctgatcatttctgttgaaaaaaagaggggaaatgtgataggatatactatatttggcggcggatatggtcatggtgtcgggatgagccagaatggggctgccgatatggcacgtgccggaaggaagagagaggagatcctttcttttttctatgaaggtgcagacctcgtaaaaatgtattaa

SEQ ID NO: 2175 - DNA, 1821 bp, Unknown
  Unknown gut bacteria
atgggaatcaaagcgagctttctacgcatgacccggagggataacatggatattttttcgttactgtcgatgatcggaggcctggctctgtttctgtatggaatggaggtccttggtgatggactgaagaaggcatccggcggtaaactggagcacattcttgagaagctgacgagcaacaagctgatggctgtgcttctgggcgcaggtgtgactgcagtgatccagtcatcttctgcaacaactgtcatggtagtcggatttgtcaattccggtattatgaaactctcacaggctgtgggagttattcttggtgccaacgtaggaacaacagtaacagcctggatcctgagccttacagatgtaaacggatccggatttttcctgcagcttctgaagcctacttccttttcgccgatcctggcaattattggtgtatgtctgatcagcatgggcaagaaggaaagacagaaaaatattggtacgatcctgatcgggtttgcggtactgatgtttggtatggacacgatgtctacggctgttgagcctctggcagagcagccggaattttcacatattctgcttatgttttccaatccggtactgggtatgctggtaggtctgatcctgacagcagttatccagtcttcatccgcatctattggtatcctgcaggcgctgtgtgcaacgggcgtagtaagttatgctacggcgatccccattatcatgggacagaatgtaggaacctgtgtgacagcactgatctccagtgcgggtgccagcaagaatgccaagcgggcagccctgatccatctgtactacaatatcataaagacagtagcatttatggctgttttttatgcactgaatgcttttatccactttgcgtttcttgaagaggcagcgagtgcccttggtgttgctgtgatccatactgcattcaatgtggcagcagtcattattattttcccggtttcctggattcttgaaaagctggcttatctgacgattcctgaaacggaagaggagagagaaaaggaagccgaaaaatccagaaaagaaattcagcttctggatacccgtttcctttctacacccggctttgcgcttgagcagtgcaagaatgtggctgtggacatggcagattattccagggaagcactgttcctggcaatccagatgctggacaagtttgataaagcctccgcagacagagtggtggagcttgaaaatatcgtagatcattatgaagatgagatcggtgcttatcttgttaagctgtcaagccgtcacctgactgaaaaagacagtcagcatttatccgtactgcttcacagtattggtgattttgaacgtatttcggatcatgcgatcaatatcatggaagcagcgaaggaaatgcatgccaaggaactggatttttccaggaaagcaagagaggaactggatatttataccggtgcgatcaaggatatcatcaacacctctgttctggtgttccaggaggaagatctgaagctggctgccatgatcgagccaatggaagaagtgatcgattatctcagtgtagaagtaaagaaaagacatatgaaacgcctccgcaaggggaaatgtacgattgaaatgggatttatcctttcagatattgtaactaattatgaaagggtatcagatcactgctctaatattgcattgtccctgttacagctcaatgaggaaaactttgaagcacatgaatatcaggaggcaatttccagtaaggataatgttgccttcacgacagaggtaaagcatttgaaggaacgttatcagctgccatag

SEQ ID NO: 2176 - DNA, 1521 bp, Unknown
  Unknown gut bacteria
atgattggaccaatcattgcagcagtagtaatcgttctcatacttgttatcattgtgaccggttacaaaaaagcaccgccggataccgcttatattatttccggtcttcgaaaaaaggttattattggtaaggcaagtgtaaagattccttttcttgaaagaatggataaactgagtctgaagctgatcgcaatcgatgtcaaaacatctaatgccgtacctaccgctgattatatcaatattcaggtagatgcagccgtcaacatcaagatcagcagtgagaaggataagctggcactggcagcagaaaactttctgaatcagaatacacagtacatagcaagtattgccagagaggttctggaaggtaatatgcgtgaaatagtaggacgcatgagactggaagaaatggtcagtgaccgtcagaaattcgcaaatctggtaaaggaaaatgcagagcctgacctggctgctatgggtcttgatattgtcagctttaatgtgcagaattttgctgatggaaatggtgttatcgatgaccttggtattgataacatttcccagatcaagaaaaaagcagctatagccaaagcagaagcagagaaggaaatcgctgtagcaaaggcagaggctgacaagcaggcaaatgatgcaagaatcaatgctgagcgtgagattgccaagaagaataatgagcttgcccttcagaaggcagagcttcagaaaatggaggatactaagagagcagaggcagatgcagcctacagtatccaggagcaggaacagagaaagacgatcgaggttgctactcaggaagcaagcattgcaaagcaggaaaaggaagttatcctgaagcagaaagaagccgaggttaaggaaaaggctctggatgcagaagttaagaagaaagcggaagcagaaaaattcgcccgtcagcagcagtcagaagcagagctgtatgagagaatgaagaatgcagaagctgagaagtttgaacgtgaaaaagaagcagaagcaatgaaggcaactgcagaagcacagaaattcgccaaggagcaggaggcagccggtatccgtatggtcggtgaagcagaagctgaggcaatccgtgcaaagggtattgcggaagcagaagccatggagaagaaggcacttgcttaccagaagtacaacaatgcggctatggcagaaatgctgatccaggttcttcctgagatcgccggaaaaattgctgagcctcttacccagattgataagatcacaattatcggcggtgatggaggaaatggtgtaggcaatgtagcagacaatgttccaagtgtcatggcaaagctttttgaaactatgaaggaaacagtaggtattgatcttgctgatatcgtaaaggcaggaacctacgatgccaaggtaaataagaacatcaatgttactggactctccggtgatgataaaaaggatgttgtagcggccgtatccggtgcagttgtgtcagaagcagcagagaataacgaaagtatttaa

SEQ ID NO: 2177 - DNA, 1779 bp, Unknown
  Unknown gut bacteria
cgaaaacaggacgagccggaggagcagatcaaggtgatcactctgccggaatcccttacgattaaggatctggcggataagatgaagctgcagccttctgcgatcatcaagaagctgttcctgcaaggacagattgtgactgttaatacagagatctcctacgaggaagctgagaacattgccattgattatgatattatctgtgagcaggaggtcaaggtagatgtgatcgaggagcttctgaaggaggatgaggagaaggaagaggatctggagagaagacctccggttatctgcgttatgggtcacgttgaccatggtaagacatcacttcttgatgccatccgtaagaccaatgtaacagataaggaagcaggtggtattacacagcacatcggtgcgtatactgtaaatgtaaagggtcagagcattaccttcctggatacaccgggacatgaggcctttacagcaatgcgtatgagaggtgcaaactccacggatatcgctattctggtagtagcagcagatgacggtgttatgcctcagacggtagaggcgatcaaccatgccaaggcagccggtattgagatcattgttgcagtcaacaagatcgataagcctggtgccaatattgataaagtaaagcaggaaatgacagaatatgagctgatccctgtagactggggcggaagcacagagtttgtgcccgtttcagccaagtccggggagggaattgataccctgcttgaaacaatccttctgacagcagagatcatggagctgaaggcaaatcctcacagacgtgcaagaggtcttgtgatcgaagcagagcttgacaagggacgcggacctgtggcaacagttttggtacagaagggtacccttcatgtaggagactttatttctgcaggagcgactcatggcaaggtaagagccatggtagatgataagggcagaagagtgaaggaagcactgccttccacaccagttgagatcctgggtctttctgatgtaccaagtgcaggtgaagtatttatcgcacatgagagtgataaggtagcgaagtcctatgcagagacttaccttgcacagaacaaggtgaagaagctggaagaaacgaaggccaagatgtccctggatgatctgttcagccagatccaggcaggcaatctgaaggagctgaacattatcgtgaaggcagatgtccagggtagtgtagaagcagtaaagcagagtctgatgaagctttccaatgaagaggttgttgtaaagtgcatccatggcggcgttggtgccatcaatgaatccgatgtttccctggcaagtgcatcctcagcgatcatcatcggatttaatgtacgtccggatgccatggcgaagaccattgcggaaagagaaggcgtagatatcagactttacagagtaatctatcaggcaatcgaagatatcgaagctgccatgaagggtatgctggatcctgtttacgaggagaaggtgatcggtcatgcggaagtaagacagatcttcaaggcatcagcagttggaaatattgcaggatcctatgttcttgacggtgagttcagaagagactgtaaggttcgtatcaccagagaaggggaacagatctatgaaggcgagctgaagtccctgaagagattcaaggatgatgtgaaggaggtcaaggcaggattcgaatgtggtctcgtgttcgagggctttgaccagatgcaggagcttgatatcgtggaagcctatattatggtggaggttccaaggtga

SEQ ID NO: 2178 - DNA, 1752 bp, Unknown
  Unknown gut bacteria
atggaattatcaacactgtatcgtgaaagaacactggacaggctttccgaagatgatatcggtaaggttcttaaggtagccggctgggtagagaatatccgtgaccatggtggtgtatccttcattgatttaagagacatgtacggcgtactgcagatcgttatgaggaataccgacctgttgaagggaatcagtaaggaagactgtgtgacgatcacgggagaggtagagaagagagatgaggaaacctacaatccaaagatccctacaggaacgattgaactggaggcacactctatcgaaatccttggtaaggtttacaagccgctgccgtttgagatcgcagcctccaaggagatcagagaggacttacgtctgaaataccgttaccttgacttgagaaacagaaaggttttggataacatgatcttccgttccgaggtgatcgcattcctgcgccagaagatgacggagatgggatttatggaaatgcagacccccattctgtgtgcttcttctccggaaggcgcaagagactacatcgttccgtcaagacattacaagggtaagttctatgcactgcctcaggcaccccagcagtataagcagctcctgatggtatccggaattgataagtacttccagatcgcaccctgcttccgcgatgaggatgcaagagcagaccgttctcccggagaattctaccagcttgatttcgagatgagctttgctactcaggaggatgtattccgggtaggtgaggaggttctgacagccacctttgaaaaattcgcaccggagggcttccaggttacacaggcaccttatccggttatcagttataaacaggccatgctggagttcggctccgataagcctgatcttcggaacccgctgagaattattgatttgtccgaattctttgaccgctgtaccttcaagccgttccagaacaagacagtaagagctattaagatccacggtcatcagtccaagggcttccatgaaaagatgctgaagtttgctaccggaatcggcatgggaggacttggatatctggaggtacaggaggatctgtcctataaagggccgatcgacaagtttatcccggatgatatgaaggcagagctccgtgaaaaagcagggcttgaagcagaagataccatcttctttatcgcagataaggaagagcgggcagcaggctatgccggacagatccgtaatgagcttggtgccagactggacctttatgagaagaacgcataccgtttctgctttgtcaatgacttcccgatgtttgagctggatgaggagacgaagaagatcggatttacccataatcccttctccatgccgcagggaggactggatgcacttttaaataaggatccgctggaaatactggcatatcagtacgatattgtctgcaatggagtagagctttcttccggagcagtccgtaaccacagcattgacatcatggtcaaggcctttgagatcgcaggctatgatgaagaagtactgaagcagaagtttggagcactctatcaggcattccagtttggtgcaccgccgcatgcaggcatggcacccggggtagaccggatgatcatgcttctgcgcaatgaggagaatatccgggagatcattgccttcccgatgagtggtacagcacaggatctgatgtgtggggcaccgaatgaggtaacggagcagcagcttcgcgaggttcatattaaggtaagggcatag

SEQ ID NO: 2179 - DNA, 1407 bp, Unknown
  Unknown gut bacteria
atgaagatttacaataccctgacaaaaaggaaggaagagtttgtacctcttaccgaaggaaaggtgaagatgtatgtctgcggacctacagtatataatctgatccatattggaaatgcaaggcccatgatcgtatttgatacagtaagacgttatatggagcataagggttacgaggttaattatgtatccaactttaccgatgtggatgataagatcatcaagaaggcgatcgaggaaggtgtggaagcatctgtgatctccgagcgttatattgcagagtgcaggaaagacatggctgccatgaatgtaaagccggctactacacatcccaaggctaccgaagagatctgcggcatgctggatatgatcggtaccctgatcgaaaagggtcatgcttatgtggcagaggatggtactgtttactaccgtacaagaagctttaaggattatggtaagttatcccataagaatctggatgatctgcagggaggaaacagatctcttcttgtaaccggagaggatcagaaggaggatccccttgatttcgtactttggaaaccaaagaaggacggagagccttactgggagtcaccctggtgccagggacgtcccggctggcatattgagtgctctgtcatgagcaagaagtatcttggggatgagatcgatatccatgcaggcggcgaggatctgatcttccctcaccatgagaacgagatcgctcagtctgaggctgccaatgacaagccgtttgcgaaatactggatgcacaacgcatttctgaatattgataataaaaagatgtccaaatctgccggcaatttctttactgtcagagacatcagtgaaaagtatgatcttcaggttcttcgcttcttcatgctttccgcacactacagaagtcccttaaacttcagcagtgagctgatggaagcagcacagaacggttatgacaggatcgtgaccagcgtcagcaatctggattatctgttaaagaacgcagagggttccatgacagaggaagaaaagaagctggcagaggaagcggctgtctacaggacacgttttgatgaagccatggatgatgacttcaatacagcggatgcactttctgttatttttgagctggtgaagtttgccaataccaacgcaggagagggcagcagtcaggaattcgtacagtatctgaaggatgagatcacagagctttgcgatgtatgcggtctgatcgtagagaaaaaggaagagattctggacagcgatattgaggcattgatcgcagagcgtcaggcagcaaggaaagagaagaacttcaaaagggcggatgagatcagagatgagctccttgccaaaggaattgttctcgaggacaccagagagggcgtaaaatggaagagagcctga

SEQ ID NO: 2180 - DNA, 2325 bp, Unknown
  Unknown gut bacteria
atgctattgcttagtggctgcggcaccttgaaaaatacagaaggcacagcaggaaacggaaagacagatgatggtgatggtgcaggcagtactgccatgggaagatatatggaaacagagctgtctttagaggatatgatgcagggaaacatctgccagttgctgacactttcagatggaaataccgtaatacttaacgaatttgacagttctctgatatcggaagatcagggacagagctttcatacctatgagataccggttgtggatcaactgaatgcagaacagcattatgtgatggacctgaagatgaatgcggatggaaccactgctgtgatctacgatgacaatacggaagaagagtctgtagacgagtttgggaaatatatcaaatatatagtgatctctccggaaggagagacgacagaactgacactgccgctgtcagaggatgagtatgccagaaatgtgtggatttctccggagggcgactgctactttgcatcggtcagcacccatacgctttaccgggtaaagaagggagaaacggaaggaacgccttttctgactatagatgaggatgcgccgagaatgctttcctttgccggagatctgatgatcatggatggctatgattatgaggcaccgcttttgtatgaccttaaggcggatacgtatgtagaggatactgtgctggcagattttgtaaaagaatactacggacagaggtcctttaacggaagcagttggtttgatctgtatctgtttcagggaaaagaagactgtgtgatttacctggccggtaccaaaggacttcacagacatgtgatcggcggaagtgctgtagaacaggtcattgacggaagcctctcaaggctcagttccccatcctatggcctgtgtggcatggtggagctggataatcaggaatttctggctgttttcagcggtggtattgtcgtgcattttgtgtatgatccagatattgcctctgtaccgtctgtgaagctgaaggcatacagcctttcagaagatacttatatgcaggcagcaataacggagtatcaggtaaataacccagatgtttatgtggaatatgaaatcggaatggaggagggaagctccgtaaccaaagaggatgccctgaaaaagctgaatacacagattctggcaggacagggaccggatattctgatcatggatggaatgccgctttcttcctatatagaaaaaggacttctgctggatctgacagatactgttgctgatatggaacaggatgcagagttctttgataatgtcatagaagcaatgaagcaggatggtgggatttatacgctaccatgtacgatcaatcttcccatggtatttggaagacagtgggcagcagaggcaggccagggtttgacacaggcagcagatgctattgaaaagctgcagcaggaaaatccggaaagtcagattttccagccttatatgtattctccggtagcggtaatgaagcgttttgcgatggtttctgcaccggcatggatcagagaagacagtacgctggatgaagaaaagataaaagaatttctggtacagacaaagaggatctatgaggcacagatgaagagcatgacgccgcagagacaggaaaattttgatatgtacaatgagtattttgtcgctgactatggagaaaactgggcagccaatatttcattctgcggactggatgagatgagttaccttggcggcggaagcctggcagagatgggaatggtagacggtacctatgattatggaatgcttacctcagtaaaaaaggtagacgggtttgaagatgttacctttgcgccgatgaacgggcagagcagtgatgtgtttataccacagacgctggtctctgtcagtgcaggatcgaagaatcaggaacaggcacttgactttttacggatgtttttctctgtgaagtatcaggggcaggtcagtggattttccattaataaagacggcctgagagaaaattttgcggcaggcagaaatgcaagctggctgcaggatcaggaaccggatgaaaacggagatgtagtttatggcatgatgtccgtaggcaatgctgacgggctggaggccactctgaatgtctactggcccgatgaggaagcagaaaacagcctgtatcagctgatagagcaggtcaaagttccctatctggaagatgagacactggaaacggccgtatttgaagagggaaagaaatatctggaaggaagctgtgatgaagaggaggcagtcagaaatatcagggaaaagctggccatttatatggcggagtag

SEQ ID NO: 2181 - DNA, 2154 bp, Unknown
  Unknown gut bacteria
atgaaaaagaaaaacataacccgctctgtactgagcctattgcttgtggcattacttggcctgtcagtcacaggctgcggtaaggcacaggcacccaccctcacagacgaaaacacaaatgcagaagcctctgcttctgctcggccatccgatacaccggcagaagagataccagcagccaatacaccggcatctgattcctcttctgctgtgcagccatccagtgcactgcctgtaaaggcgctgcacccaaaacaggtagaggaaaacccttatatggccaaaagtgatgccaatattcatcacgatggctataataccgactccacggatgaaattcttcctctcggcatttatccggaaatcaatgtctcttatgagacgaccaatgccaatgcttcaccggccatttactttgacagctacggacatgctgtcgttccgctgcttggaggcattgccatccgtgacctgaatgctgaggaaacccagacacttggctatttctctccaaagcagcatgacggtggcgaatacatcattcagagttcctatacctttctggactcagaaaaccgtattgtctgtcccaccagcaataaccatgttctaatgctgcgcacaacagatgaagacggcaatgtgcttccggaatttgaaaaggtactggatatcgacattaaggccgcctcagaggctgcacttggcaggacgctggagcagaatcttctgtctgttgtttttgattatgaaggaaatctctggtttgccaccggtggcttccggatttatcctgagcgtaaacagcagggtgtggtcggttacattgatcacgaagccattgatacgatcctggacggtgggcaggcagatctgtcaaaagccgtatacgtccatgagctgactcctggtgaaggtgcagaaaacggtattgctgcttcccgggaaggcgctgtgatcctgacaaatcagaactgttatctgctgcgtgcagaaaatggtgtggaaattgtgtggtgcacgccatacgaaagtattggtgcaaaggtcagtggtgaaaatgacaaaacgaccggcggcggccttgcgtggggcggcggctgttctccctctctgacaccaaacctcgtaatgttcaccgataaccaggatccggtaaatctcctggcccttgacatgaagaccggaacgatcgtagcagagtgtcctgttcttgatgatctccctgatggctatcaggtcgcagtagaaaattccgctatcgtatatgacgatggagaaggcaccgtcagcaccattgtctgcaactggtttggtgccggcaatgccgggcttgctgatccggacaatgactcttccatccagagctatgctaatatttatgatacaaactggctcacaaagggaaatatcatgattgcccccggtgttgaacgtatcgataccgtaaaaacaaaaaacggctatgaaatgaaaagcatctggtgccggaatgacctgagtgacacatccatactgaagctctctactgcaaccggctatatttacggttatgtacaggatctgggcagcggtatgtggcaatatatcattctggattttgaaaccggtgaaactgtattccccatggatgtatccaataaatatggctacaacaacatggcgatcggtatgtataccggcaacagtggaaatgccctttattgtcccaccggatatctggaactgctgcgcttacaggaccggttcgcatacctgcctgaaatgccttatcgcaaaattgatctcgatcaggcatcccgccatgtactttcacaggagcagtttacagcagccggtggtgcaggctctgttgcaggctggctgaatacaatatccatccgtaacgtacatcctaatactactgttgccttccgcatgaataatctctctggaagtgtcaatgatctgacactctatgcttacaatgcagctggcatcctgacacctgttgcatctgagctgtggaagatcacctctgaagatggtcagacagtaacagaactgacagatggtacactctatgaagtacgcatcaccgttgcagacaacggagatctcgatttaaacgaagtggaaaaagaaatccggctttctgttgtgcttggaaagtag

SEQ ID NO: 2182 - DNA, 1824 bp, Unknown
  Unknown gut bacteria
atgaatatactgacagcctctaaaatcagcagatcgtttggagaaaagacaattttgagggatgcttccttgtatctggaggaaggagaaaaggtcggcatcatcgggatcaacggaacgggaaaatccacgctgctgaaaatgatcgcaggactggaggagtcagacagtggaactatcaccagagcctcgcatctggtgatcagttttttgccgcagcatcctttatttccggaagaacagactgttatagaggcagtcttgcagaaatgccgggagagcagcagatcagggcatacagaccaggagctggagacagaggcaaagcggatgctgacaaggcttggtgtaacagatttcacggcaaagtgtgggatcctttccggaggacagcgtaagaagctggcacttgtggcagctcttctgacaaggccggatctgctgatcctggacgagcctacgaaccacctggacaatgacatggcggaatggctggaggaagagctgaaaaagctgccgggagcgctgatcatggtgactcatgacagatatttcctggacagtgtggctacaaggatcatagagatcgacagaggcaggatttattcctatgatgagaattattccggatatctggaacgaaaagcggagcgggaagaagcactggcagcaggagagagaaagcggaaaaccattctgcgtaaagagctggaatgggtaaagcgtggtgccagggcaagaagcaccaagcaaaaggcgagactgcagcgttatgaggagctgaaaaacagggaggcactgtcagcaggcagccagatagatattggcagcagtgccacaagacttggcagaaccactgtggagatcagccatctttccaaggcatacggggataaagtgctgatccgggatttttcctatatctttttaaagggtgacagagttggcttcgttggcaggaacgggtgtggcaagacaacacttgtaaagctgatcaccgggcgcatcgaaccggatgagggcagtattgtgatcggacagacagtgaagatcggctgctatgatcaggagctgacagagaaggaaatgccgccagagcagcgtgtgatcgattatatcagagatgtggcggaatttgtacagactgaggaaggaccggtttctgcagccaaaatgctggagaggttcttgtttgagggagaagcacagtacggacttctgaagaagctttccgggggagaaaagcggagactgaacctgctccgggtactgatggattcaccaaatgtcctgatcctggacgaaccgaccaatgaccttgatattgaaacactgacgatcctggaggattatctggacagcttccctggaatcgtgatcatggtgtcccatgacagatatttcctggaccgctgtgcaaggaggatattcgcctttgaggaaggtggaaatatcaggcagtatgagggcggttatacggattaccgtgaccgggttcagatggaaaggggagaattttcagaacagacaggaagcagtgaaaatactggcagtgcaggtaaggtaaaaacagaatcgggaaaagcctggaagctgccgtctgcaaagctgaaattcagttataaggagcagagggaatatgaaacaatagaagatgatattgctgcactggaagagaaaatagaaactttggaggccgggatcctgaaggcggcgactgattttgtgaagctgaatgagctgacgaaggagaaggaagagacagagaagcttctggaagaaaaaatggaacgatgggaatatctggaggaattagctgagaga

SEQ ID NO: 2183 - DNA, 2271 bp, Unknown
  Unknown gut bacteria
atgcgccgcctgtttatggcggcgttttttgcaaaaaatgttattttaaggaacaaaaagatgaaagattttgaaatggaaaataagacagtggaaacagaaagcataccagcagtcattctggagaatctgacgatcctgccgggtgctgtgatccactttgatctgcataaagaagaagccatttcctctcttgagcatgccatggcagagggaggacgtgtttttctgatcacaaaaagaaagcaggaatcagaagcagcccatccggagaagaagctctatgccattggaacggtagctgttataaaacagatcacaaagcttccagatcacgtagtccggatcctggtagaaggtctttatcggggaaagctgatcggattacagaagaaagaaaacagatatttctgtgcagatttgctgaagatgacagatgaagggtcaggcggactggaagcaggtgcagagatcgaggccatgctgcgtcaggttaaggattctttccgggcttatatggcatttcatccaaagctgggacagaatcttgcaaaacgctatgattccatcactgatcctggcagactggcagatgagatggccatgaatatgccgataacctttgaacagaagcagcaggtgctggatgcctgcgacctgaaggaacggtatgagatcctgtgcagcatactgataaatgaagtggaaattgccaaaatacggtcggagcttgtacagaagcttaaagggagagttgataaaaaccagaaggaatacctgcttcgtgagcagctccgttatatcagggaggaactgggtgaagatggatccctatccgatgcagaccagtttgaaaaaacgctttctacgctgcaggcgacggaagaggtaaaaaagaaaatagcaaaggaaatcggaagattccgcaacctgacaggaaacagctctgaaagctccgtagagagaggctatatcgaaaccttgctggagctgccctgggataaagcatctgttgacaatgaaagcatgaaacgggcagaggagatcctgaacagagatcattacggtcttgaaaaagtaaaggaaagaatcctggagtttcttgcggtgcgctgtctgaaccagaagggagacagcccgatcctctgtctggtaggacctccgggaaccggcaagacatccgtagcaaggagcgtggcagaagccctgaacaaaaaatatgtcaggatctgtcttggaggtgtgcgggatgaggcagagatcaggggacaccgtaaaacctatgtgggagctatgccgggacgtatcattacgggtctccggcaggcgggagtaaagaatccgcttatgcttcttgacgaaatagataaagtgagtaatgattataagggagatacgttctcagctcttctggaagtgcttgacagtgaacagaatgtaagattccgtgaccattatgtggaaattccggtggatctttcagaggtactgtttattgccacagccaataccacagagacgatcccaaggccactccttgaccgtatggagatcattgaggtcaacagctacacgcagaatgaaaagttccatattgcaaaggagcatctgctccccagggaactgaagaaaaacggtctctcaaagagtatgttatccattaaggatagtgcattgaaagcggtgatcgcgtattacacaagagaagccggggtcagaggtcttgagagaaagatcggggatatctgccggaaagcagccagggagattctggaacgaagagaggaaggaaaggaagaaacacagatttctgtgacagcctccaatctggagaagtaccttggcaagaaaaagtttacccaggaaaaggcagacaggcatcccaagacgggtattgtcagagggcttgcctggaccagtgtgggcggtgaaacgctgcagatcgaggtaaacaaaatgccgggaaaaggggatatcgacctgactggtcaaatgggcgatgtgatgaaggaatccgcgatcattgccatgagctatgtaagatccatcagtcaggaatacggtgtggatcagaaagtctttaaagaatgtgattttcatatccacatcccggagggagcagtaccaaaggatggaccgtctgccggtatcaccatggctacggccattttctcagcagttacaggagaaaaggtgcgtggtgatctggcaatgaccggtgaggtcactctgagaggaagggttcttcccataggaggattgaaggaaaag

SEQ ID NO: 2184 - DNA, 1086 bp, Unknown
  Unknown gut bacteria
ttgaaaaaaaaggaacaaaataagggttccagactgaaagtgatcccacttggcggtctggaacagattggtatgaacattactgcctttgaatatgaggacagtattgttgtggtagactgcggtctttccttcccggaggatgacatgctgggaattgatcttgtcattccggatattacctatttgaagaacaatatcgaaaaggtaaagggatttgtgatcacgcatggacatgaggatcatatcggtgcgcttccttatatattaaaggagatcaatgtaccggtttatgcgaccagactgacgatggggctgatcgagaataagctgaaggagcacaacctgaccggacaggtaaagaggaaggttgtgaagttcggacagtccatcaaccttgggcagttccggattgaatttatcaagaccaatcacagtattgtagatgcagcagcgctggctatttattctccggccggtattgttgtgcacaccggcgatttcaaggtggattacacaccggtatttggagatgccatcgatctgcagagatttgcagagcttggaaagaagggagtccttgcccttatgtgcgactccacgaatgcggagcgtcctggctttaccccttctgaaagaacccttggcaagacatttgatgccctgtttgaggaacataagaatacaaggatcctgatcgccacctttgcgtccaatgtggacagagtgcagcagatcatcaattccgcctataagtttggcagaaaggtagtcgtagaaggccgtagcatggtcaatatcattgaggttgcgacgaacctcggatgcctgagcataccggataagacactgatcgacatcgagcagctcaagaattatccgagagaaaagactgtcatcatcactacgggaagccagggagaaagcatggcagccctgagccgtatggcagaggacaatcacaagaagatttccataggcccgggggatacagttatcttttcctccaatccgatcccgggaaatgaaaaggcagtcaccaatgtgatcaatgagcttcttgtcaagggagcggatgttatcttt

SEQ ID NO: 2185 - DNA, 1683 bp, Unknown
  Unknown gut bacteria
atgaaaaagtttcatgcaaaatcaggaaacaaagtactggcactggtgctgacagcagctatggtattaggtcttgctggctgtggaagcacagaaatgcctgccgggagcgcagatgatgcaacagtagaaggaacatcagaagcaggagctgcaggagaagcggcttccggagaaaagatcgttaatatcggagtgacggactccctgggaagcatcaatccctttgttatcgatcagacatttattaataagtatgcagtggatctggagttccttccgttagttgactttgcagaggatctgagctttgagtatctgctggcggattccattaccacagaggataacaaaaatttcattgttcatatcaatgaagatgctgtatggtcagacggtacgccgatcacctctgatgatgtgacctattccttccttcgtctggcaagtccgctggtagccaatgcaactctggtttatggagtgtttgaaggcgtagattccgagacaggatttgtagaggaaggagctacagaggtttccggtctgactgctgttgatgaaaagacagtacagtttacaaccaaggagcctatgagcatgatcacctttatgagctcatatgcagcgtatttccataccatgccaaagagcattattgagaatattgctgaaggcgagctgactacaagtgactggttcaatcatcctgatgttgtcagtggtccttatatggtaactgattatgatactaaccattacatttcttatgtagccaatgaaaactactggaagggagcaccgaagattggcaagatgaacttcaagatccttgatgccagccaggtatactccagtctgcagtccggcgaaattgatgttacaagccacaccatgaccaatatcccgcaggaagacaatgacagcattgatgctcttgagaatgtggatgttgtttacggttctcctgtaaccaaccagtctgtatttatccagacaaagaacattccggatgccagagtacgtcaggcgcttgtatatgcgattgacagacagaagatcgtagatgatctgctgaagggacatggcgaagtgatcgatggctttgtatcatctgcaagtccttacttcgatgacagtattacaccgatttcctatgatcctgaaaaggcaaaagagattcttgcagaagctggctgggatggctcacagacactgcgtttctttgtaaattccggtgatggcaccttcgtgaatgcagcgcaggtaatggcagcacagtgggcacaggttgggatcaaggtagaggtacagacagttgaccttgctacactgatgagcatggcaggcggcactgattatgatctgtttgcagtacagtacacttatccgccgatcgatccttccgtagatatcgcatggcttcttggtggagaggacagctggaccggttacagcaattccgcaattgatgatgcactggcacaggttggctccacagatgacacggcaagtcttaaagatctgtactccatcattgacaagcagacacaggaagatgtaccgatgttttctgcttatgtgatcagtgcacagggcgcagtgaacaagagactgaccaatgtacatgccaatgtatatggacttttcaacaatatccaggaatgggatatcgttgaataa

SEQ ID NO: 2186 - DNA, 1650 bp, Unknown
  Unknown gut bacteria
atgaatgtggatctgaaaaagaaaataattccagctatatcgggatttatgtatgcggtctgtcttgtctttggacacagccttgaaaaagaaggcagcatagcctacagggatggcaggctatggattacgatcctgatccttggtattctgctttcggcggctctgacagtaattatgaaccagcttcagaagagattgctgccaaaaggtctagagcatgagacaggacagcagatcagacaggatccggcaggccgcatgacatttttatatgcaggcataattttcctctgctatctgatcgtattccttggtgtatacccgggatttttcgtatatgatgcacaggatgaactgatgcaggtcattacccgcagcttctccacccatcatccgctgtttcacgtacttctaatgggaggtacagtacagctcatccataagctgacaggctcatataatgcaggaattgcctgctacacactgctgcagatggcagcgctgtccctgatcttcggatacgggatccggaagcttaaggaagaaggcatgggaagaaggggaggtattctcttactggcttattttggaggatttcctacgatcgtcatgttttccctctgctcggccaaggatggattatttaccggcatggtgtttttgatggtattgatgctgtgtacattcttccgggatccggcaggcttttttcagaagaaggggcactgtgcatgcctgtttctttccagctgcctgatgatgctccttaggaacaatggcttttatgccttttttgtattcgtggtgctcctggctctgctttttctcaaggcagaatggaagccctgcagaaagaaaatgctgctggtatgtgcaggcgccatgctcgcattccttgtggtcaacaaaggctttgcccttgtactgcatgctgatgacagtgaaaatcaggagatcctgacagttccgatccagcagcttgccagagtgtacagtatggaaggtgacaccctgacagagcagcagaaggagacgctgtttgagatcctgccggaggaggcattgaagcgctacaatcccaaggtttctgatccggtcaaggtggactttgataatgaagcttatgaagctgataagggaaagtacagaaggctctggtctgatcttttcagggagcatcccttcgggtatctcaatgcctggtttatgacctcctatggattctggtatcccggggcagtcattgatgtgtataaaggaaataccgtgtttacgtttacttatgaaggaagctcctattttggctatgaggtagaggagccgggagagagaaagagcatgatcccggtggtcgacagggcttaccgtttcctttcccttgatgaaagggcacaggagattccgcttttatcgctggttctgtcaccgggagcaatgttttttctgtggacctttgtcctttgctttttctggtatacaggacaggacaggaagctgtggccattcctgtttccgggactgcttttcctgactgtactgcttggtccgacctaccttgtcaggtatgtggtctttctgtgggtgcttctgccggtgcttttgtgggagctgtgcagaaaatcagaaagaaaagcagcagaaaaatga

SEQ ID NO: 2187 - DNA, 1566 bp, Unknown
  Unknown gut bacteria
tttgtcacgggacggaggctgtacagctataatattgcagacaataagctggcctatctgtttggttttacggaccggcacgatcaggatgagagagacagctacgataaacatgacatccagatcctgaatgtggacgagggtggcaatgtgacctttatggtatatggctacatgaaccgcggccggcatgagggaaaggttggaatttcagtttattattatgatggtgcggtgaacactatagaagaaatgctttatgttccaagcagtaagtcaccggagcttctcatggcagaggtcaaggagctgtcttatatcaataagggtggtacgctgtatctcctgctcgacaatgtcctgtatggcatcagctcggccagccgctcctgtgatgtgatcgtcaaggatctgaaggagggctgctatcaggtatcggacagtaatcaaatggtcgtctggcagaaggaaaatgagctttatgaaggaacagagctgatcctgatgaatctgaatactggtgtacagagtcatatcaaagccgaaaacggagaggcgatcgctcctatcggttttatcggggatgatctgatctacggagctgcaagaaaagatgatattgtgccggatgaaacgggaaatctggtatttcccatgtacagtgtcaggatcgaaaacgaaacggaaggtattttaaaggaatatcatcaggaaggcatttatgttacttccggcagtgtaaatggaaatcagatcaatttaaagagagtgacccgtacagaagcaggaacctatgaatcggtcagtgatgaccagatcatcaatgcagaaacacagacagaaagcagtaattatctggaaactgttgcagtggatctttatgaaacagtaacgcagattgcactgaaggaagacatcaatacagactctatgaagcatctgacaccgagagaagtgcttttcgaaggcggaagaaatattgtgatcgctgcttcccaggagcggggagacagatactatgtctatggaaagaatggtgtggagggcattttcatgaatgaaggaaatgccgtgaggctggccagtgatgtatccggcgtagtggtagatgataccggctcttatatctggatgaagggcaatcggagcctgaagaatcagatcatggcaattcagggaatgggagcggaagagaatcagggaagccttgctgtatgtctggacacgatccttgaatatgagggaatcagcagaaatacccagtatcttctggatcggggagagggggtcctgcagatactgaaggataatctggagcagtccagagtactggatctgacaggtgtcagccttgacagtgtgctttactatgtcaatcaggatatcccggtgcttgtcatgacagaagagggggaagcggtgcttctgatcggattcaatgagatgaatacggtgatcatgaatccggcaaccggaacagtttacaagatgggaatgaatgattccaaagactggtttgaaaagaatggaaaccgatttattacttatgtaagaatggagcagtaa

SEQ ID NO: 2188 - DNA, 1545 bp, Unknown
  Unknown gut bacteria
atgtcaatgagaatgaccggtatgttttccggtatggatacggaaagcatcattcaggagctggtcagtgccaaacggacaaaagtagatacacagaaaaaggcacagaccaagcttgagtggaagcaggatgcctggaaggatctgaatactaagctgaagaatcttcagtccaaatatatcgcaaatatgcgtttttctgatgcatacagcaaaaaaacgaccaaggtttccaacagcagcgcagtcagtgtgatcacaggtgaaggtgctgtgaatggagtgcagaccctggaagtttccagacttgccaaaactgcttacctgacaggtggtaagattcagagcagtaaggaggtaacggcgcttacgactcttggagagctggatggaatgcttggagatgatttttccggtacgattacagtgggagccggagacaagcagaaaacacttaatattgataagaataccagtatctcaacggttctgaataccatgaaggaagcaggcttaaatgccagctatgatgccggacagaagaggttttttgtcagcgctaaatcatcaggtgaggatggaaacttcagcatcacaagtggtgatgtaagcggacagaaggcacttaagatgcttggcatttcctatgacgcgagtgcagaatctaccggaaagagtgatgatgaggctgcagcacattataccaagggacagaatgctgagatttatctgaacggtgccaaatttaccgacagcaccaatgtatttgagatcaacggactgacctttactgcactttctgcaacagcaccgggagagacagttactgtgaccacagagcaggatactgatggtatctatgacatggtcaagaatttcctgaaggaatataacagtgtgatcaacgaaatggataagctgtacaatgcagattccgccaagggctatgagccgctgacggatgatgagaaggagtccttgtccgattctgaggttgagaaatatgaaaagaagatcaaggatgccctgctccggagagatgacaatctttccacagtaaattctgctctgcagcagatcatgtcaggcggcgttgaggttggcggcaagaccatgtatctgagtgattttggcatcgataccctcggctattttacagcagctgagaatgagaagcatgcttatcatatcgatggagactcagatgatgccagtaccgctggcaatgctgacaagctgaagaccatgatctccaatgatccggacacggttatttccttctttacgtcactgtcccagaagctgtatggcaagatgacagacctttccaagtcagtagacggctacagaacctttggtaatttctatgatgacaagaaaatgaagtcggattacgatgattacacaagcaagatcaaggagctggagaagaagcttcaggattatgaggataaatggtactccaaattcagcaagatggaaaccgcgctggccaagatgcagtcaaattccagcgcagtaacaggattattaggaggctcatga

SEQ ID NO: 2189 - DNA, 2286 bp, Unknown
  Unknown gut bacteria
attcttgtactgaataccggaaatatcatggatatggatttcgtagaggaatatcatccgcaggcacttctttacgcatggcagggcggtatggtcggtggatatggaaccgcagatgtactgcttggtaagacctgtccgagcggcaggctgacagataccattgcttataagatcacggattatccttctgatgccaattttggcaacagggacagggatctttatgaggaggatatttatgtaggctaccgttactttgaaacagcagcgaaggaaagggtccgctatccctttggctttggtctttcctatacagatttcaggacctgggacgtcagcttcagcgcaggggaaaaggatgcggagattacctttaccgttcagaatatcgggactgtgcccggaaaagaggtagtacaggtttatgtgacagctcctgagggagcactttccaagccggaaaaggtgctggctggctttgccaagaccagggaattaaagccggggcttaaagagcagatgaggatagctattccctatgagagctttgcttcctatgatgaaacaggggcaagcggctttgtgtcctcctatattctggaaaagggggagtatctgttccatatcggaaggaatgtcagggagaccgaggtggcaggaagctttactcttgaggaaacggtatgtcttgcctccctgtcacaggcactggctccggtgacaccctttgagaggatgcgttttataagagaaaaagacggagctgtacataaggtaatggaggctgctccgctcagaaagaagaatccggcagagaaaagaaaagagctggtgccggaggagcttccatttaccggagatcagggataccgtctgatcgatgtaaaggaaggaagggtatccatggatgcctttgtggcacagtttaatgatgatgacttaagctgtatcatccgcggagagggtatgggaagcccaaaggtaacacctggaacggcagcagcctttggcggtgtatccgaggaacttgcacattttggcatcccctgcggctgctgctctgacggaccctccggtatgcggcttgacagcggcatgaaggcattcagcctccccaacggtacactgcttgccagcaccttcaatacagcacttgtggagaagctgtattcctttaccggaattgagatggtgaagaacaaaatagatgctcttctgggacctggtatgaatatccacagacacccgctgaatggaagaaactttgagtatttttcggaggatccttttgttacgggaaagatggcagcagccatgatccgtggcttaaagagtgcaggagtgacaggaactgccaaacatttctgtgccaacaatcaggagacaggaagatctacggttgattctgttatttcggaaagagcactccgtgagatttatctgaagggctttgaaatggcagtcagggaagccggggcagattccattatgacgacctatggaagcgtaaacggactttggacagccggaagctatgacctgaatactacggtcctgcgaggagattggggctttcagggtatcgtgatgaccgactggtgggccaagatcaatgatgaaggagaagagccaaggatcaacaactttgcggcaatggcaaaggcgcagaacgatctttatatggtctgtacagatgcttcaatcaatgacagtgatgataataccctttcatcccttaaggcgggaacactgacaaggggagagctgcagagaaatgcagcaaatatctgcggattcctgatgaatacccatgctcttgaaagaatggagggcatacagaccagtgtggaggtgatcggagaaacagatcaggagatcacttcagatgcagaggttacttattataaagtcgaagatgagatcagtatttctctggatggagtggataccggcaaggataaggacttcgtttttgcactggatctgcagaagcttggcgggtatcgtgtggaagtaacagcaaagtcagacttatcagagcttgcgcagcttccggcgacactgatctatcagagcgtaccgatggcagtcttttcctttaatggaactggcggagagtggaagacgataaagagaaaggcagtattccataataaatacgctgtacttcgtctttactttgcacagaatggtctggaggtacagaagatcaccttccgatttgacagggaactggagagaaaggatgatgttatcgaggcttatgtaaacagtaacgactaa

SEQ ID NO: 2190 - DNA, 1530 bp, Unknown
  Unknown gut bacteria
tacgatggctgcctgatcgctttttacctgtttgatgaaacagcgcttaagattgccctgcaggaggtagacgatcagagccttgctgtgggaatgatctatctggataattatgaggaagcacttgatagtgtagaggaggtcagaaggtcgcttctgactgcgcttattgaccggaaagtgaataaatatattgccgctctcgatggaatctgcaagaagatcgagaaggacaagtatatggtcattctccggaaaaaatctgtcacgatcctccgggagaataaatttgacctgctggatgatgtcaagactgttaatattggaaatgagatggcagtaacgatcagcatcgggctgggactggacggactttcctatgcacagaactatgaatttgccagaaatgcgatcgatcttgctcttggaagaggcggtgatcaggcggtagtcaagacaccggagaatacgatctactttggtggcaagagccagcaggtagagaagaacacgagagtaaaggccagagtaaaggcacaggctctcagggaaattatatctggcaaggatcaggttcttatcatggggcacaggcttccggatgcagacagcttcggtgcagcggtgggcatttaccggattgcacgtattctggataaggaagcccacattgtactgaatgaggtaggaaagggtattaagcccatggtagagctctttcagcataatgaagactatgagaatatgataatcaacaatcagcaggcacttgaatatgcgggtggaaatacggcacttgtggttgtggatgtgaataaaccaagtatcacagaattcccggatctgctccggttgtgtaaatcaattgttgtgctggatcatcacaggcagggaacagaaattattgagaatgcaacattgtcttatgttgaggcatatgcttcctctgcctgcgaaatggtttctgagatcttacagtatataggagataatatcagaatttctcctgaggaagcagactgtatgtattccggcattatgatcgataccaataactttatgggtaagacaggcgtccggacttttgaggcagcagcgtttcttagaaggaacggtgcagatgtgacgagagtccgcaagctgttccgtgaggatgctattgagtataaagcgaaagcagatgctgtcagccaggcggaaatttacaggaatgccttcgcaatttccacatgcaccagtgaagatatagaaagtcctacgattgtaggtgcacaggcagctaatgagcttctgaatatcagaggagtcaaagcaagctttatcatgacagaatatcagaatcagatttttgtcagtgcgaggtctattgatgagatcaatgtgcagatcattatggagaagatgggtggaggcggacacctgaatacggcaggctgccagctgtcagggatttctatttcggaagcaatcggaattctgaaggcaacgctggatacgatgatcgaagacggtgagctcgtgctggagtga

SEQ ID NO: 2191 - DNA, 1536 bp, Unknown
  Unknown gut bacteria
atggctgcccaaagtaagagtgcaaaactggatcgaaaaaaactgttttctgatccggttatggtaggaatgatcagtattctgctcattttccttgtattatttattgtatatccgttgtttgttcttttaattgacagtatttatactgaaggaaagctcacgctttccgtattccagagagttctcagcatgaagcgtttccggactgcgttttccaataccctggtgcttggacttctgacaggaattctttctacggcaatcggacttctttttgcatatgtagatgtttatgtaaaaataaaaaacaaagcagtaggaaagctgtttaatgttgtatcactgcttccggttgtatcaccgccttttgtattatccttatcgactattatgttgtttggacggagtggaattattacccgttcgctccttcacatatatgattccaatgtatatggattaaaaggaattgtagtcgttcagacactgacctttttcccagtctgttatctgatgctgaagggacttctgaaaaatatagatccatcgctggaagaagctgcccgtgatataggtgcttcccggatgaaggtatttacgacagttaccctgccgctgcttctgccaggtcttggaaatgcgttccttgtaacctttattgagtcagttgcggatttcgcaaatccgatgctgatcggtggtgattatgatacgctggcaactaccatctatctgcaggtaacaggatcctatgattctacaggtgctgcagcgatgtcagttgtattactttcattgacactgatccttttctttatccagaaatattatctggaaagaaagacagcagctacattgacgggtaaagcatccagagcaagaatgctgatcgaggataagagtgtaaccattcctcttacactgatctgctgtcttgtagcactgtttgttatcatcatgtatatcatgattccttttggtgcgctgtttaagctgtggggacgggattattcactgacctttaagtggtttgattatctctttaaatacagtggactgaaggcgtttaaggattccttcctgctttcagtgatcgcagcgccgatcacagccctgctttccatggtgatttcttatctggtagtaaagaaaaaattcagatccaagggatttattgaatttgtttctatgcttgccatggcggttcccggaacggttcttggtattggctatatcagaggctatgcaaatggaattttccatacaggtgtcctcagtggtatttatggaaccggaattatcctgatcattgtatttatcgtcagaagtcttcctgttggaacaagaagtggtatttccgccctgagacagattgacaaatccattgaggaatctgcttatgatctgggagcgggaagcggaagagtatttacaacagtaacgcttccactgattaaggattcgtttttcagtggcctggtaacatcatttgtgcgtagcattactgcgatcagtgcgatcattctgcttgta

SEQ ID NO: 2192 - DNA, 1635 bp, Unknown
  Unknown gut bacteria
atgagtatatataaacaatactgtagtgaaattgttgatgaaaacggcaggttacaaaaaataacactgaaatatccggataactttaatttcggttatgatgttgttgataaaattgcagatgaaacaccgcaaaaacgtgcgctggtctggtgcaacgtagaaggtgaagaacatattttttcatttgcagatataaaaaagtacagcaatcagatggcgaatgtgtttcaaagtgcaggaataggccacggagaccgtgttatgctgatcctgaagcggcactacgaatactggtttgctgcagtggcactgcacaagctgggtgcagtgatgataccggtaacgcatatgctgacggtcagcgaccttgtatatcgcatgaaagcttctaaggcaaaggcatttgtatgcactacccagaacgaggtcccgggaaaaattaccgaagcgctggaagaggctggcatgacagcaaagctctggtgtgtacagggggatgcagacggctttgaaaatatgacagaagctatgaaagaagcttctgaagaatttgaacgtgtgcagaccctggcggcggatcctatgatgctgtattttacatccggcactacaggatatcctaaaggtgtaattcatgatcacagttatccgcttgcacatatcgtcacggcaaagtactggcatcaggcagaggaagacggcctgcattttactgttgcggaaacaggatgggcaaaagcatcctggggtaagctttatggacaatggctggttggctgtgcggttatggtgtatgattttgataattttgagccaaagcagctgactgcagttatcaaccattatggtgtaacctccttctgtgcacctcccacagtttatcgttaccttgtgcgtaaaggcattcctgacatgccaacgctcaggcatgcaaccacagcaggtgaaatgttagcccctgaggtgtttcataagtttacagaacgtaccggacttcaactctgtgagggctacggacagactgagacaacattattaatggcaaatttcaaaggctatgatgccgtggagggttccatgggaacaccgtcccccttttacaatcttgagcttttgggaaaggacggaaaacctgtagggattggcgaaataggggaggttgttattattcctgaaaaggctggtaaacagccaggtgtatttactacatatctagacgatgatgaacagtacggatatgtctggcgtgatggggtatatcatacgggtgatgcggcatatatggatgaacatggctattactggttccatggacgttttgatgatatcatcaagacaggcggcttcagggttggaccttatgaagtggaaaatgtgctgatggagcatcctgccgttgtagaatgtagtgtgatcggcgtaccggattctctgcggggtcaggcgatcaaggcagttgttgttcctggggcaggatatgagccgtcacaggagcttgagctggaaattaaaaatttttgcaatcagaagctttcagaatacaaatggatccgtttcgtggaattcataactgaaatgcctaagaccatcagcggtaagatacaaaagacggtgcttcgtggtcagaaatag

SEQ ID NO: 2193 - DNA, 1671 bp, Unknown
  Unknown gut bacteria
atgatcgtggaagtcatcggagaggtgcttttgccgaagtttatggcaaatatcattaatatcggagcagcaaaccaggatgtaccctatatcatcactatggggattgtcatggtagtgactgctcttctgatgatggcaggaggaattggcggtgcttactttgcggccaaggcggcgatcagctttgcagcagatatcaggaaggatacctttgagaaggtacagaaattttccttcgcaaatctggatcagtacaataccggttcactggtaaccagactgaccaacgatgtaacccaggtacagaacctgatcaatatggcgctccgtatgatgctccgggcgcctggtatgctgatcggggcgctgatcatggcatttatgatgaacagagagctggcagcagtgatccttgtagtgatcccgatccttgtgatcctgatcggaattgtgatcaaaacagcatttcccagatttaccatcatgcagaaaaagctggatacgctgaattccacgatccaggagatgctgacaaatgttcgtgtgatcaagtcctttgtcaggggagattatgaggaggagaagttttcaagggccaatgaggatctgaagaaatccagcttaagtgcctttaatgtagtgatcctgaatatgccgatcatgatgctgatgatgaacctgacgactcttggtgtggtatggtttggcggaaagcagatccttgtcggcaggatgccggtcggtgatctgacagcctttactacttatattgtacagatattgatgtccctgatgatgcttgccatggtgcttctgcagagctcaagggcaatggcatccctgcacaggatcacagaggtgctggatgccaggattgatctgacagatgaaaacagcgctcagaaggataagagggtagagaatggaactgtagagtttaaggatgtttccttccgttattataaagaaaacaaggagcctgtcctttcccatatcaatttcaaaatagacagtgggaagatccttggcatcattggctctacgggaagcggcaagaccacactggtacagatgatcccaaggctttatgatccggatgaaggagaagttctggttgacggggtcaatgtcaaagagtactcgctggagcatttgagagagggcgttggaatggtactgcagaagaatgtccttttctcaggaacgatccgtgaaaatctcatgtggggagatgaaaatgcttctgaggaagaggtggaaaaggcggcagcagctgcgcaggcaggctttttcagagactttacagaaggctatgaaacagagcttggacagggcggtgtcaatgtatccggcggtcagaagcagagactctgtatcgcaagagcacttcttaagaagccgaagatcctgatcctggatgattctaccagtgcggtagatacggcaacagaagcaaagatcagagaaagcttctccggacttttaaaggaaacaacaaagatcattatcgcacagaggatcacttctgttatggaagcggatgagatccttgtgctggatgaaggtgagatcgttggaaagggtacgcatgagaagctgcttaagacctgcgaggcttaccaggagatttattattcacagatggataaggaggcgagcggacagtga

SEQ ID NO: 2194 - DNA, 2520 bp, Unknown
  Unknown gut bacteria
atgaacaagacaatatatcagagcagagctatacaggcagtgatcgtgatcatcgcagcgattctgctgctctccatatggccgctccgcatttttaaagaaaccgttacaacctccgtaggatcccctgcagaagagatgcaggcctatacagtgaatgaggagagcatggtcatgcagaccattgccgcccagtatgaccatatgaacaccctgcacctttatctgggagcagatgcacagggcagtgatttctatgtcaggatccttgacaaggactggcagcaggtctgcgaggaaaaggtggatattgacgaggctgcacttcccggctatcaggaggtggagatcgatgtagatatggaagtcaatgcactttactatatcattgtacagggagaccagtcagagattcaggtcatgtcggttccggcagccatgacagatatgccgttccttggagaactgtattatcaggatgcatccatggatggcatgagccttgtggcagattatgactatggcatgccgctccgcaagatgggtatgctggtctgcggcgcagcgatcattatagtggcagcacttcttctgcttctggtaaagggaatctaccggaaccgggaagataagctgatcactgtggaaaaggcctttaagacggtgatgaaccctttggtcgcagcaggaacccttgcagcattaattgcaacgttccggggtacctttggtcactatgcactggataatacagtatttgtgatcagtattcttttcctttcagtgatcctgttctatgggatcaaccacagcagagaaggacagagccctgtgatcacggaagactatctgaagagtcatgcaggagatctcctccagtccatctgtattgcgggagccctggcagcctgctgtgaatatatgagcggtctttacgacattcaccatgcagtggcagaacggaaggaaatgatctggtttgccctttctgtgatcgccatgttcaggctgaaggatattttccgggtatataacctgatctatctggtggcagcagggattgcaggtcgttcctactatcaggcacatctgacagaggatatggatgacctgaacagacaggtactgaaatatacggtatggatcgccattctgcttggctttatcgtgatccggacggtgatcgcactctgccagaagaagctggcaaagccaaatgtatggtacagtgccctgcttcttgttttctttgccctgatcattattttcaggaatggcagatggtggacagttaccatggcggctgcctttacgctgctgtatctgaattatgggatgtgggagcataaggaacgcttcctgaccaatgtactgcgtggcactgtcctgcagtttgtgctggcgacaggctactgcctgctccacagaccctatgtgaccttccggaatgcgagatatacccatattttccatacggtcaccatcacggcgacatatctgaccatgatcgagtgcgtggcagcagtactgcttcttaccaagctgaccaaaacgagaaagctgagagatatctggaaggagcttagcttcttcggggtagtttcttcctatatgatatttactatggcaaggactgcctactttgcagtgggagccacggtgctctttgccctgatcctgattgcagcaggaaagggaaaagcaagacttctcaatataggaaagaaccttggactgttagtcctttccgtgatcgttcttctgcctgtgacctttaccctgcagaggaatatcccggcgcttgtcagtgaaccctatctgtatgagatcgagtattccatgtattgtccggaggatgtgatgagaggacgtcatgcggattccaagaatttcatgagagtgggccgttttattgatgttttctgcgaaaagatcttcggtatcccggagggaacctttgacatatacggggagatcaaagaatatcagagaactcatcagaagcaggtggcatcgcttaattatgtgccgtctgcggatgatctttacatggcaaagggcagtgagcttctgttggccagtgcaggcgagctggatgaaaatggaaacccggtggatattccggaggataatgactataccaacggcagagtggatatctaccgttcctatatagagcagctcaatatgacaggacatacggaaatgggagctgtgcttaaggacggcgagattgcgacccatgcccatgatatttatctgcaggtagcctatgatcatggtatccctgtgggtatcgtgtttgtcctggtgggagcagctacgttcatcgcttctctgctttattatggaaagcagaagaaaacgatcacctatgcggcgctgcctgcagtgatcacggtggcagtagcagtagcgggtattgtggagtggatctatcatctgtccaatccctgtggatatctgctgatgctggtgatcacgcccttttttttcatggaaaagcaggctgccaaataa

SEQ ID NO: 2195 - DNA, 1314 bp, Unknown
  Unknown gut bacteria
atgttagaaaccttaaaaaacgcatttaaaatcaaggaaattagaaataagatattatttacatttgccatgctggttgtgatccgtttaggatcacagctgcctgtgccgggtgtagacagacattatttttctaactggtttgcacagcagacaggtgatgcgttcaacttttttgatgcctttacgggtggatcattcttaaatatgtccattctggcactcaatatcacaccctatattacatcctccattatcatgcagcttcttaccattgcaattccgaagctggaggagatgcagagagacggggaagagggaagaaagaaaatggtttccattacccgttatgtaaccgtagggcttgctttatttgaatctaccgcaatggcaatcgcatttggcggcaacggtctcctggagaattacaatgcactgaatgtgattacagttattgcagctttaacagcaggtagtgccttccttatgtgggtaggtgaaagaattactgaaaacggtgttggaaatggtatttccatagtcctggtaatcaacatcatttcccgtattccacaggatctggcaagtctgttccagcagtttgttatcggaaagccgattgcaaccgctgtctgtgcagcagcactgatccttgcgatcattataggaatggtagtacttgttattatactgaatgacggcgttcgtaagatccccgttcagtatgcgaagaaaatgcagggaagaaaaatggtcggcggacagacatcctctatcccgctgaagatcaacaccgctggtgttattccgatcatttttgcatcttcactgatgcagcttccgatcattatctgcagcttctttaagattaatggtaccggaatatgggcacatatcttaagaggactgaattcctcttactggtgcaatcccaaggaaccggtgtattccataggacttctggtgtatgttgtactggttatctttttcgcctacttctatacatccattaccttcaatccacttgagattgcagagaatatgaaaaagtccggcggctttattccgggtatcagacctggaaagcctaccagcgagtatctgtcaaagattttgaattatatcattttcatcggtgcagttggtcttaccattgtttgcattattccttatttcttcaatggtatcttcaatgcttccgtatcctttggcggaacaagtcttatcattatcgtcagcgttgtgcttgagacaatgaagcagatcgaatctcagatgctggttcgtaattacaaaggttttttgaatgactaa

SEQ ID NO: 2196 - DNA, 2328 bp, Unknown
  Unknown gut bacteria
atggaggaatttaagatgcgttcgaattatacagaaaaggcgcagaaagcgctgaagctggcagaaaaaacagctgccaggatccattcgggctatgtggggacggaacatattctggcaggaatattaaaggaaggaaccggtgtggcggcaagggttctgaccgaaaacggagtagaggaagagcagcttcttaccatgatcaaagaactgatcagtccggatgcagctgttgttacaaaggacagagaacaatattcgccaaaggcagaggccattttacaggaggctgacagacaggcagaccgtttccgagcagataagacaggaactgagcatatcctgctgtcactgctcaaagagagtgaatgtgtggcaacaagacttctccggactatgggtgcagccatacagaagctgtatattgatacactggcagcaatgggtgaggatcctgcattatataaagaggatctggcgatgaaacagaagaacaaaaaaagtgctgctacactggagcagtatagcagggatctgactgccctggcgagagatggcaggctggatcctgtgatcggaagagaacaggagatccagcgtgtgatcgagatcctgagcagaagaagcaagaataacccctgtctgatcggagaacccggtgtcggcaagacagcagtggtagaaggactggcacagcgtattgtggccggggaagtaccttttactgtgcagaacaagcggcttcttaccatggatctttcaggaatggtagctggctccaagtatcgtggtgagtttgaagaaaggctgaacagagtgatccatgaagtgcaggaggaaggaaatattatcctgtttctggatgagatgcatactattatcggtgcgggtggtgcagagggagccattgatgcttccaatatcttaaagccttcactggcaagaggggaattgcagctgatcggggcaactacagtggcggagtatcataaatacgtggaaaaggatgcggcacttgagagaagatttcagtctgtcatggtagaggagcctactgtgcaggaggcagagcggatcctcaaggggatcgtccacaaatatgaggagcatcacaaggtggtgatcacagaagaggcggtcagagcagcggtagagctttcagagagatatatcaatgacagaaatctgccggataaagcgattgatctgatcgatgaggcttcagcagcagtcaggctgaaggcaacccacgttcctgaaaagctgaagaaaatgcaggaggagcttgcagcgtatgacagaaaagtggaaggcttcctgaagaaaagagagtttgatcaggcaggaatatgcagggcagagcaggaaaagctgatccacaaatatgagaaggcctgtgaggcaaacaggaagaaacaggaaaaggatgagcttaaggtaacagagaatgatatagctgaagttgtggcggcatggacgaagatcccagtgaaaaaactgacagaaacggagagcgaaaggctgatgaagctggaaagcatcctgcacaagcgtgtgatcggacaggatgcagcagtcagcgccgtatcaaaagcaatacggaggggacgggtcggcctgcaggatccggaaaaaccgatcggatccttcctgttccttggtcctacgggtgtaggaaaaacagaactcagcaaggcactggcagaggctatgtttggatcggaaaatgccctgatccgtgtggatatgtcagagtatatggaaggtcactctgtatccaagatgataggatcgccccctggatatgtgggatttgaagagggaggacagctcagtgagaagatacgcaagaatccctattcagttgtattgtttgatgagatcgaaaaggcacatccggatgtatttaatgtgcttctccaggtgctcgatgatggacatatcaccgattccaagggaaggaaggtcagctttaagaatacggttctgatcatgacttcaaatgccggggcacagcgcatcattgcgccaaagaatctgggctttggagtggcagaaactgaaaaacagaactatgaccggatgaaggaaggggtcatggaggaagtcagaagactgtttaaaccggagtttatcaacaggattgatgagatcatggtattccatccgctgaccagagtggatatggaaaagataaccacactgctgtttcatgagctttctgcgagatgtgagaagcagctctccattcatcttagtgcgtcaagagcgctgaaggagcacctggtagagaaatatgcagactacaagatgggagcaaggccgtta

SEQ ID NO: 2197 - DNA, 1830 bp, Unknown
  Unknown gut bacteria
atgccttcacagttttttggattacagatcgcaggctcggggcttagggcttccaatgcggctttgaatacaacagcaaataatatttccaatgccaagaccaaaggctacagcagacaggcggtatcacaggaagcaaataatgcactgcgtacctttacgacctatggctgcgccggtgccggagttgatacgatcgcaattgaacgtgtgagagaccagttctataatgtgaagtactgggataacaactgtaaatatggagaatatcagtctaaggcctattattgcaagaccattgaggattatttcaatgataatggaagtacaggctttaagagtgtctttgataagatgagccaggcactgcagagtgtggtatccaatgccagcagtgatcattcaaagcagaccttcatttcctcggccaaggcactgacagattatttcaataccatgtatggaaatctgcaggagctgcagaaggatgtaaaccttgagatccagcagaatgtggatcagatcaattccattgcagagaagatcgccaccttaaacaagcagatcaatgtcattgagctttccggagcaaaggccaatgaactccgggatcagagagaaaagctggttgatgacctttctaagatcgtggatgtggatgttacagaatatgacatcacagatccgaataagccggacagaaagacggggggaacccgttacattgtgcagatcgcagggggacagccacttgtagatgccaatgattacaataccctttcctatacagcaagatccacctccgagaaggtgaaccagacggatgtagacggattgtatgagatccactggtcaaacggcaatgagtttaatctgaccaatgcagccatgaagggcaagctgaagggacttgtagagctccgggatggaaataacggcaccaactttgaaggtaaggtaaagtctgtaacggatggcggcacaaaggttacgatcgaggtaacagccaatgacctgaaggatatgaagacctgtacgctttccgacacgggcggtcatatcaatatagcaaatacgatctatgattatacatcatgggtatacaataatgatggcacttacacctttaccctgaagacgagtccggataccggtcttcctacaacgcaggcagccggtaaggaagcaaagacctcagaatccgttaaatatcaggggattccttattatatggcacagatgaacacatggatcaggggcttttctgagaaggtaaataatatttttaccggtggtgtgaacgcttatgacggtaagggatgcatcctttttacaggaaataaggcaacgggaggacagtatacagaggctgaccttgatgcagctaaggacaacggtctgtatgagctgacggcaggaaactttactataaatgaagagcttctgaatgatgcagggcttctgggcaccaggtcatggatctcgaatgatgaatttcagggtgtggaggaatgcggacagatcaaggaaatgatcgagcttctgacgagcaaggagaaataccagttccggaatggttcagccagtcagatgctggagatgatcctgtcggatgtggcactgaatgcaagcaatgccaatacctttgaaaagacttatgagggactggaaaatacgattgagaaccagagaagctcgatatccggagtggataaggatgaagaggcggtcagccttgtaaaatatcagaattcctttacactggcatccaagatgatccagacactgacggaaatttatgacagactgattctggaaaccggcgtataa

SEQ ID NO: 2198 - DNA, 1359 bp, Unknown
  Unknown gut bacteria
atggacaaatttttcaagctgaaagagcgtggaactgacgtaaggacagagtttattgccggtatcacgactttcatgacaatggcctatatccttgccgttaaccccagtattctgggagcagccggtatggacacaggcgcagtttttacagcaaccgcattagcatctgcgcttgcatcaatctgtatggcactgtttgccaacctgcctttcgtactttctgcaggaatgggactgaatgcctattttgcctacacagttgtgctgggaatgggatacagctgggaggttgccctgacagccgtatttgctgaaggtattgttttcatcctgctttccctgaccaatgtcagagaggcaattttcaatgcaattccaggaggtcttaaggtagcagtttccgttggtattggattattcatcaccttcattggactgcagaatgcacacatcgtagtagacggttctaccctggttggactgttttcctttaagggatctattcaggcaggaacctttaattctgaaggaattactgtcgtactggcactgcttggcattctgatcacttcattccttgttatcaagaatgtaaagggaaatattctccttggtattctgatcacatgggtactgggaattatctgccagcttaccggattatatgtaccagcaccggatgcaggcttctacagcctgatccccagtggcatcgtatctgcaccggcttcccttgcaccgacactgttcaagatggatttctctgtgatcggatcactgaacttcctggtggtagtatttgcattcctgttcgtagatatctttgatacccttggaacactgatcggatgtgcgaccaaggctgatatgctggataaggatggcaagcttcctggaatcaaaggcgctctgatggcagatgctgtaggtactactgtaggtgcgtgctttggtacatctacaattacaacctttgtagaatcttcatcaggtattgcagaaggcggacgtaccggacttacttctattgtatcaggagcactgttcctgctggcactgttcttctcacctatttttcttgcaattccttcctttgcaacagcaccggcgcttgtcgttgttggtttctttatgatgcagcaggaagcaaagattgcatggaatgatatgctggaagcaattcccgcatttatctgtatctttgctatgcctttcatgtattctatttcagaaggtatcgcatttggcgttatctcctatgtagttcttcatgcagctgcaggcaaggcaaagaagatcaccccgcttatgtgggtactggcagtgctgtttattctgaagtacatcttcctgtaa

SEQ ID NO: 2199 - DNA, 1221 bp, Unknown
  Unknown gut bacteria
atgaaaaaatggaaaaaaggactctgccttttgctgagtgttctgctggtaagttcagccggaagcgcaggcacactttctgccagtgcacaggagctgacgaatgacagcatcaggcagaaggaagaagagataaaaaaagcaaaagaagaaaagaacagccttcaaagcagtctgagtaatgtaaaagagatcaagaagcagcttgaaacctccaagaataatctggccaattatattacggagctggatgctaatctgtctacgatacaggccaagatagaagaacttaagggtctgatcacagagaaggaagaggaaattgctgccaaggaaaaagagctggaggaggctgtggcggtacaggaagcccagtatgaggcaatgaaggcccggatcaagtttatgtatgaaaagggagatacggtataccttgaactcctttttgcggcagacagctttggcgaggtgttgaacaaggctgagtatattgagatgctttcctcatatgacaggaaaaagctggatgaatatgtagcacaggctgagtatgtttccctgtgcaaggaaagcctggaggaggaaaaaagcgttctggatgaggccaggagggtacaggaagaagaagaggcttccatgaatgcactgatctcggccaaagaacaggagatcagcaatgtaacatctgatatcaagaataaagaggctgctattgcggaatatgaggctgatattgcagaacagaatcaaaccattgcggcattggaaaaggcagtcgcagaggaaagagccagactggcagaggagcagggcagaagatatgatggtggagtattcacctggccggcgccgtcgtatacgaggatatcggatgattatggaaaccgtatccatcctactcttggtattcagaaattccataatggaattgatatggcagcaccgggaggcagtgcgattctggcagcctatgacggtaaagtagttgctgctgattacaacagcagtatgggaaattatatcatgatcgatcatggcgacagcctgtacacgatttatatgcatgcatcggcactttatgtttccaagggaaccgaggtttccaaggggcagaagatagctgcggtgggaactacagggcgatccactggcaatcatctgcatttcagcgtgcggaagggtggaagctatgtaaatccgtggagctacctgaagggttga

SEQ ID NO: 2200 - DNA, 1362 bp, Unknown
  Unknown gut bacteria
aagaaaacaatagaggatctccggaagggactggtggatatcgtgatcggcacccacagagtactgtcttccgatgtggtattcaaggatcttggacttctgatcatagatgaggagcagcgctttggggtcgggcacaaggagaagatcaagaagatgaaggaacaggtggatgtgctgacgctgacggcgacaccgattccgagaactctccatatgagtctgatcggaatccgggatatgagcgtcctggaggaggctccgaatgacagactgccaattcagacctatgttatggaatataacgaagaaatggtgagggaagccatcgtcagggagctttcccggaacggacaggtttattatgtatataacagagtcaataacattgcagatgttgcagcacagatccagagtcttgtaccggaggctgatgtagcctttgcccatgggcagatgcaggaacgggagctggaaaagatcatgtatgatttcatcaatggagatattgacgtactggtatccacaacgatcattgaaaccggactggatatccccaatgtcaacaccatgatcatccatgattcggataatatgggactgtcccagctttaccagctcaggggaagagtcggcaggagcagccggacggcttatgcctttctgatgtataaaagagataagatgctgaaggagatcgccgaaaaacgtcttgcggcgatcaaggaatttaccgagcttggaagtggcttcaagattgccatgagggatcttgagatcagaggtgccggcaatctgcttggggtgaagcagtccgggcatatgcaggcggtcggctatgacctgtattgcaagatgctgaatgaggcggtgaaaacgcttaaaggggatagtgtggtggaggatttcaataccacagtagacctggatgtggatgcttatattcctccgtcctatatccttaacgaagtacagaaactggatatttataaaaggattgccgggattgagagccagagtgagtgcgatgatatgaaggaagaactgttggatcgtttcggggagatcccggtaccggtgcacaatctgctgcgtatcgctctgatcaggtctcaggcacacagactgtacattaccgagctgaaaggaaagaacggtgaaataaagcttctgatcaaggcggatgccaggatccatgcggagcggatcccggagcttcttggaaaggtggaaaagctttccttcaatatcaagctgacaacctttgtgtatcattatcagagatctggtgtggcagagaaggatgccagatccctgctgcaggaaacagaagagcttcttaacatcatggaagaggttctt

SEQ ID NO: 2201 - DNA, 2673 bp, Unknown
  Unknown gut bacteria
gcgttccagatctccgccgaaagcggcaatgatttcaaggcgatagcctgtacgatccgtgaccacacagtggcggtcctcgttccagacgttctctccggcgatctgtacccctatatcgagctgaacaagccgtatacgaaggccgcgacggtcacggccctctattccgacgccagcggaaagccgcaggagaagatcatcccggaattcgtcaaaacaaccagccttccgaacgtgctttcccgcggcgcggcgggcaatactgtcatcctccgcgcaagcataacggggacagacggctatgaccagagcgtcgacctgaccctgcggctcgaccggatgccgacgctggcctctctccgcgtgacgaacgcagccgagaccgcgcaggccgcagacaaggcgttctccccgacggatacggaatacacctaccagatcgtcgacaccgccaaagagctgcgaatctaccccacggcgacgctcacgggcagcagcataaccatctcctccaacggaacagattacccgctcgacgaaaagggcggcgcagccgtgccggtcaacgggaacaccgacgtcaccgtctcggtgaaaaacggcgcgtatgagacggcctataccctgcacatccagcccggcaaggggcaaagcgtcaagctcatcctgacggacgcggacgagcttgaggtgcggaacaaaaacggcgaggttctggcctatacctcggttcaggagcttgggaaaccggtctatacctacacactggtcccgaacgaaacctacagctacgtggcaacgaagaacacctggtatcacgcgaagaaggactttacgctcagcgacgtgggcagcggcctgaccatggccgtcgaggtgacggccggagactggctgaccgagctgacgcttgacgtgccgtttgacggcggcacgagcttcacgccagcgcagcacacctattccgccacatactgggacgccacggtgacgccctctgcgcaggccgcgcagcagaacgaggacggagattccctcggccctgtctgtgtgatttaccccacacagagcacaaagcagcccgagacgccgcagcagcagatcgatttaagctccgggaaaagcacccatctgaactgggccgtgctggacggcagcgcccacgagaatacgctcaccttccgtgcctcgcgctatgacgcggcaacgaagatcaccagctatacggactatcaggtgacgctgaaacggtcgctcagcctcgagagcctgtccgcctcggcaaacggcgtatccgtgccgctccgctatcaaaccgcctccggcacgcaggcagagggctatacagccacgcaatcagactataccgtgctcgtcccggcggcagcacgctcgctggatctgaagctccaggcgcacggaaaactgccaaaatacggcgacgaagacgtgggctatctcgtggacgggacgccgctcccggaggatcaaacctcgtccacaaggccggtatacgagctgtctctgccgctgaacggcagcggcagcaccgagacgctccgcttcacgctgacgaaccggcacaacgagaccgcgaaaacggtctataccatcaccgtccagaaggcggcggcgaccagcgtccgcttccaaaccacgccgaaggacgcgctgatctgcgtcatagaatcgggcagcaatcagcgcgtctggccggaggacggcgtcttcgcgctctccgagggctttacctatctctattcgatcaccagtccgggctatatcgggcagggcggcgagatgacgctcagcacggaaaacggcgtgcagaagctgaccatgggcggcaaaacatactccgatctcagcaacgtcgccatttccttgcagacagcgcagaaaaacacaacgctggacaccacactgagcgccgaatgggcagatttccgtggaacggcctatgtaaaaggccagatggccgcgggcggcaaccgcaacaacgccgtcacagacgcgcccacgcccatctccgcgacggaaggcacgctctactgggccgtccatctcggctcctcggccaccggcagcggcagcatgggcggcggctcggtcagcaatccgatcctcgtgaacgacgagctgattgtctacgccggaagtacgctctaccgcatcaacaaggacacgggcgaaacgatcaaaaccgggaaaatggccggttcgtccagcttctccatcaacggcccgacctatgcggacggcatgatcttcgtcgcactgacgaacggcgtggtgcaggcgttcgacgccgactcgctggaatccctctggatctaccatgacccgctcaagggccagccgaactgccccattaccgtctcaaacggctatgcctataccggcttctggaacagtgagacccgcgacggcagcttcgtctgcctccccatcgcggacgagcggccaactgccagcaatggagaaaaatatgccgcctggcggcacgtgcagaccggcggcttctactgggcgggcgcatgcgtccaaaacggcgtcctcctcgtgggcacggacgacggccaggactcgacctcgccggtgctgtcgaccggccgcgtgctgctgttcgacgcggccacgggtgcgctgctggacgaagtgggcggcatc

SEQ ID NO: 2202 - DNA, 1014 bp, Unknown
  Unknown gut bacteria
ggcgtggagccgaagacggcgacgttcaacggacactccacggtggtggccgggctggaatctgggaaggattacaccttcaccctgcaagaacctgaagggacacgcctgaccggccagacgaaggcctacttctcgaccgttccggctgtcagcatcacgggcatcaaggccgcgctctccagcacgacagcgatcctctcgtggacgatcgagggtgacgcacccgagaactggaccgtcgaggtcacaggcccggacggctacgcagattcgcaggtcgtcagcgcaccgaccgtcacgctcgaagggctgacctcgggcgagacatatgaggtcatgatctcaacgccgacgatgttggaaaactgctcaaccaagatcacgccgaacgtcacagcgctcacgagcttcacggcagagccggatctcgaggccggaacgctgcacttcacgtgggagtgcgagaacgagcctgccgacaacgcatggacaatcaccgcacggctccacagcgaaaacagcgagctggtgcagtacacgtggacgccggaggccaacacgaacagctacaccgtcgatctggccgatttgctcccggagacggaatatgacttcacgctgaaccttgcgagcggcgacaagctggacggcgagaacgtcaccggctacaccacgccgaacaaggacaagttccgcagctatggcacgaaagatttctacctcggcttgttcctgaaaccggacagcgacacgttcacgagtaagaacctctccgtctcccggacgagctttgacaccgacgaattcgttgcgttcgcattgcagtccatcaacaatgtcaaggattcgggcgataccgtgccatacacgatggtgctgaccgacaaggacggcaagatcgttgacgcggagttctcgagcatcacgtggaacggcgcatggacgcacaacatcttcgcaggcttcttcccgcgcatgccgcaaatcgccggtgattacaccctgacgatc

SEQ ID NO: 2203 - DNA, 1041 bp, Unknown
  Unknown gut bacteria
acaggcgaatatgacaagcgtgtgcgcgacgtcgagccgatcggcagtatggacacctatctcgaagcctatccggtctttgccgactatccgaagaccggcgactttgtcctcggccagaccgagaactgcatgaaatctgtcgccgcgatcaaagaacgctgcgaagcggcggacgttgagctggtcgtcgtggccgccccggtctatatcgactatttccagaactttcaggccgaagatgttgcaaatttctatgcgtctctcgcgaaagtcaccgatttctgggacttttcgtgcagcagcgtgagctgtgagccgcgctatttctacgacgcgacccacttccgcaacgccgtcggcagcatgatcgccgcgcgcatcgcgggtgacgattccgtctacattccggacgatttcggcacttacgtcacagcggacacgccaagctcctacttctccgaggttttgcaggccacggccctgccggacgagacggtcagccgcgacgtaccggtgctgatgtggcacaatcttgcggaagagtccagcggcgacatgacgatctccgtggacacgttccgcgcgcagatcgaggcgctgcatgaggcgggcttcaaaaccgtctcgctccaacagctctacgattatgtccattttggaacggaattgccggaaaaaccgattgttttgaccttcgatgatgggtatttcagcaattacgagtatgcgtttccgatcttgcaggaatacgatatgcaggcgacgatctttgccatcggcgtctccgtcggcaaggacacctacaaggacaccgaccacgcgatgacgccgcacttcggcgcggacgaggcgcgggaaatggtggattccggcctgatttccgtacaaagtcacacatttgacatgcaccagtggccgccgtttgaggacggaaacgcacaggtgcgcgagacgcttttaccgttcgacggcgaggccgatgcggactatgaggcggcggtcgaggccgatttcgccgagagccgcgagctgctctaa

SEQ ID NO: 2204 - DNA, 723 bp, Unknown
  Unknown gut bacteria
atggatatggaaaatagaaaagtcaaagtcaaggtcacccacctgaccaagaaattcggcgacctgcttgttttgaacgacgtttcctttgacgtgtacgacggcgagttcctgtgcatcgtcggcccgacgggctgcggcaaaaccacgtttttgaacagcctgacgcacctgtatgagccgactgccggcaacattctgctcgacggcgaagagatcgatctgcgcaagcacaacatcgcctacatctttcaggaatactccgccatggagtggctcaccgtccgcgaaaacgtccgcttcggtctggacatcaagcgcgactacaaaaacatcgacgagaaggtcaacaacgcactcgatttggtcggcctgacgccgtttgccgattactatcccaagcagctgtcggccagcatgctccagcgtgtcgtcatcgcgcgcgcctttgcgacgcagcccgatctcctgctgatggacgagccctacggccagctggacatcaacctccgcttcaagctcgaggacgaggtcatccgtctgtgcaagcagaccaaaacgaccgtccttttcatcacccataatatcgaggaggccgtctatctgggcgaccggatcctggttctgacgaacaagcccacctccatcaaggagatcgtccccaacgacgcgccgcacccccgcgacattgcggctcccgattttatcgagatgcgcaaccgg

SEQ ID NO: 2205 - DNA, 1758 bp, Unknown
  Unknown gut bacteria
accgatgaaaatggcgaggaacagaccgagacctatacatacaccaattaccggacggcgctctattcgctcgatctggacagccaggtctgcgctgaggtgcagggcctgacgctcccgtccgtcgaagagggctgggagggcagcagctacgtcaacgacttccaggtcatggacgacggcagcatctggattttctgcattgtcagtcagtataagaccgagctgcccgacgattttgatccgaatacacaggacgaatggcagtatcagatcaatgagaacaagaccgtcatggtccaccttgacgcgaccggtgccgagctggcccgcttcgacctgatcccgccgcaggacgaaacgacggacggcacagcctcgcccgacacggtggtcggctccgccagcggcggcgacatcgtgacgtacgacatgccggcgggctattattccaatatctcctccgtcgtggtcggcgaggatgggacgatctacggctacgactggcagaacgtctacctgttcgacagcgagggcaaatatctcgcgacgatcgaggccggagacaacggcggcgagctgaaacgcctcgacgcgaacaccgttggctcgatcacctacatctacgacgccgagaacgagaccggctcaaactatttcgtgccgatcaacgtcgagacaaagtcgtatgacaccgagcacaagaccgcgctgcccaacagcgcgtgggacatctatcccggtgtcgaggaatatgacttcctctacaactacaacagcaagatcttcggctacatttcgtcgagcgacacctcggaaaagctgctcgactggatggacagcgacatcaacccgaacaacatgagcagctttgccgtgatgaacgatggccgcatcatcgccgtcctgaaccactgggacgacgagacgcagacgagcgtcaacgagctggtgctgatggagcgcgtagacgcctcgagcctcccggagaagaccgtcctgacgctcgcctgcttctatctggactataacatccagcagaagatcgtcgacttcaacaagacgagcgatgcctatcgcatcgtggtcaaggactattccgagttcaacacgaacgacgattacagcgcgggcctcacgaagctgaacaccgagatcatgtccggcgtcatccccgacatgttcctgaccgagaatctgcccatcgagcgctacgcggccaagggcatcctgaccgacctctacgagctgatcgacagcgacgccgagctgacgcgcgagagctttgtcccccagatcatccaggcctgcgagaccgatggcaagctctacgagctgcccgcgagcttcatggtccagaccgcgttcggcctttcgaaggtcgtggacggctatgacgtctggaacgtcgctgccgtgcaggacgcgatgaccaagctgcaggaggacgcctacgtctttgactattacaccacgcgggccactgtcatgggcaactgtgtctccaacaacctctccgcgttcgtcaactggcagaccggcgagtgctcgttcgacagcgagagcttcatcacgctgctgaactttgcaaagaccttcccggcggaattcgactgggaggcttacgacagtgagcacagcggcgagtatgtcgatgatgcgacgatgatgaagaacggccagaagctgctctcgcaggcatacttgtacggctttgaggattacctgtacagcatgagccagttcggcgacacggaa

SEQ ID NO: 2206 - DNA, 1899 bp, Unknown
  Unknown gut bacteria
atgaaacactatatccatgagattcccggccatcaaattcccgctcccacacgcctgcatttcgacatggtcgtcatcggcggcggcatgagcggactctgcgccgccatggcctccgcgcgccagggcgcaaagaccgccatcgtgcaggatcgcagtgtgttcggcggcaatgccagctccgagatgcggatgcacatctccggcgcctcctgccactggggcaaaaaggacgccgccgagacgggcatcctgatggagcttcagctcgaaaacaaatacctgaacgacagctataactattccatctgggacggcgtcctctggaacgccgccaagcagaccgaaaacctcaccctctatatgaacaccagcatgaccgccgtccattccgacggcgcgcacatctcctccgtcgaatgttatcagatgacgaccgagctgcgccttgagctgaccgccggcgtctttgtcgacgccacgggcaacggcacgctgggctacgaggccggtgcggaatataagatcggccgcgagggccgcgacgaatatcaggagcagtacgcgcccgccgtccccgacggcaagaccatgggcaacacgatttacttcgtggccgaggaccgcggccatcccgtcaaattcgtcaagcccgactgggcctattccttcgacgaatccgacttcaagcaccgctatcacggcgatatcgtggtctatcataatgccgatgatgtcgtcgtcctcaagccggatgaggattatgagagccattccgacgagctggtggaaaaatacgacgtcaagagcggctattggtggatcgagctgggcggcgactgggacgatatcatcaagcagtccgaggatatccgctgggagctgtaccgcacggtctacggcgtctgggatcacatcaaaaacggcggcgaccacggcgcagaaaactatgagctggtctgggtcggcaatctcggcggcatgcgcgagagccgccgcctgatgggcgactacgtcctgaaagagcaggatatcctgtccaaccgcatctttgaagacgccgtggcctacggcggctggcccatggacgagcataccgccgccggcttccgcgccaagggcgagatcccgtccgtcgtccgttccttcaaaggactctattccatcccctacggctgctattgctcgcgtaccatcgataatctcatgatggccggccgcgatatctccgcctccaagctggccatgggttccacccgcgtcatgggcacctgcgccgtcggcggcgaggccgtcggcgtggccgcggcaaatgccgcgctgctgggcctcacgcccgcgcagtatggccgcgcgcatatgcacgagcttcagcagaagctcctcgcctgcgacctgtatgtcatgggccagaaaaacgaggatccgaacgacctcgcgctccgcgcctccgtctctgccggcagcgaacagccgggcttcgaggcgaaaaacgtcatctccggcgtcacccgccgcgagggcgagcagagcaacctctggcgctccgccgcactgggcgagggcggcgagaccctcacgctcaccctggccgaaccggcccctgtccacgaagtccgtctcgtcttcgaccccgacctcagcgaagagcgctgcatctccgtctccaaggcgttcatcatgaaagagccgcgcggcgtcgcgcagacgctcgtccgcgactaccgcgtggagctgctccgtgcgggcgaaccgttcgctgcgcagaccgtcacggccaaccaccagcgccgcaatgccgtctccttcgacggcaccctctgcgacagcgtccgcgtccatgtccttgccaccaatggctgcgaagaagcacggatctatgaaatccgagtttattaa

SEQ ID NO: 2207 - DNA, 1020 bp, Unknown
  Unknown gut bacteria
atcggagcgtttctgatcagcggcgtcggcaatttctacatttcggaattctatgtgcagatggagcggacgttctcgccggagttcatcacgcagctgcaagatctggcggacggcgaaaacgggccgacgcagatgaaagagctgttgatggcgcagacaggactcggcatcgacgtgaacgaccggaacgtctatattttagacagcctcgggcaggtgctcgagggttcggacgagcggacacaggtgagcgtgtcgcagaatctgctgacggcgatgaacggcgaagtcgggcaggacggatcggtcacgggtgaattcatggatctggctgtgcccatcgtgacggacgagcattcgtacatcgcgtacatctacgacaaccgcgcgacggtcgatgcgctgacgagcgaactgatgagcattatcctgcgtgcgctgggccttggcctggtgatctgcgtggtgctctcgttcctgcttgcgcgcatccttattacgccgatccaggcgctcaccgtcggcacgcggcaggtcgccgcaggcgacttttcgcagcgtgtggccgtcgagggccacgacgagatcggcgtgctcgcgcggaacttcaaccacatggcaaaggtcctcgaggacacgatctccgaggccgagaacgagcgcaacaagctctccacgctgtttttgcacatgaccgacggcgtcatcgccttctcggtctccggtgcgctgatccactgcaacccggcggcgagccagatgctcgcgcgcgggctggactccacgacgacgttcgatgaactcttcggacaggaggcggagctggacacgctgctgacgctgcgccgcccgcaatatttagagttacagaagaccgcgggcgaccgcgagctggagctgttcatggccccgttctcgtccgaccagacgcagggcggcgtccttgtcgtcatccacgatgtcaccgagcagcgcaaatccgagcagtcgaagcgtgagtttgtcgcgaacgtctcg

SEQ ID NO: 2208 - DNA, 3885 bp, Unknown
  Unknown gut bacteria
atgaaacgaaaagggacacggatatttgcactgctgctcgcggcggtgctgctgctcggcggcctgcccatgcaggcgcttgcggctgaggacgaggcgggatggtttcatctcgctgcggactggaacggcgaactgctgatcaaaccggagcgcgtgccatatacggcggaacagacgatctacgaggccatctgcgcggcggggcatacgctcgccccgaatgcggggaacgtgacgcagatcgacggcgtggccggaaacttcatccgcggcgatgagaccggcgcagacaacagctacgatctgaccagaaaggcgtcagaggcacagatcaaatatttttgcttcgtggacaacagcagcggttcgcccccggccacaccgtccgtcacgcggcaggcgctaatcgccgtgatggcggaatatgcgcggaaggacgcggatgggcaggcggcggcgaaggcggaatacgacgcggcctgcaagggttactgcacggcggacgatacggaggctgaacggctctgtgcggcgctgaccgacgcgatcaaccgctacgaacaggggctgaatggcacaaaatacaccgtttcctttacagatacgaatggcgtctggaaggccggggatctgctgacggcgaagaatgcatatggacgcgtctattcggatgagaacggaaatggcgtgctggagcttccagcgggagactatacgttcacgatggaggctgcggcaagcggcgtgacggggagtatctcggtcccggcgcagaggacggtatccgtggcgatcgacaagacagactggcttctggcagatgagtttcagctgtcctcccgcccaaagtcagcagatttcaaaaacaatcggttttctgtcgaaaagaagtctgcgcgggaactggagacggtcgtgatcgacaactattccgggacgctttatgcgtattggcgcaacagcggaacgaccgcaaagatcccggagctgaatgcggtctacgttccggcgggagcgactgagcatgtgaaagtaccacaggcgttgtcctcctataccagtggcatcgatcatgtgctctccgccggggcggagggcagcacggtgatctaccgggccagcatggagctgggcggcagcaactattatcaggattatacgctccgcattcgccgtgccccaacgctgaaggaggtgcgcgtgacggagacgaacggctctccggctgcgctggagagctatgctgagagcacgaagacttatacctatctggtgctcggcagcaaggcctcgctggcgctgacgccgtctgtcgaggatgggtgcagcatctatgtgaatgaaaaggccgttaaggtcggagaagctgtccagatcgatgtaggacagacaaacactacggtaaagatccggctggaggccggcggcgcagaaacggaatatacgctggttctgcggccgtctacaagctgtatggtgcagatcccgatcgcggcggacgatatttcactgacggtctgtgacgagaatggacagacggtgtatggccgcttcaatgcctcgttaaagacctatcggtattcgctgatcccgggaagacgctatacctacactgcgaccaaggatcagtattatcatgccgcagagacattcaccgcggccgcaaagacgctgtcgaaggtcgacgtggagaccggcgaatggctgaccgatctggcgctggccaaggacggcgcgaaggacagcaagggcaacatcgagctggatcagaggttcacttcgaacatccaccgctacacggcggtcgtgccggacacgccgcccgcggtctatctctgggtcgacggcgagatcgaaacagcgaatacaggcttttctgcgcgctatcgcacgatcgcatccaccggtcaggatgagcaggaggtcgtgcgcaccatcagcagcaaagaacttggtacaccgctgttcttgcagaaattcctgctgaaccagagcggacgcggcaatctgctgaccgtccggtacagccgaacggtcggaacggtcacctattatcaggactacgagatcgagatccggcggtcgttctcactgaaaagccttgctgtcttctgcggcgggcaggaagcggtcctgacgcatggcggcggcgcgagcggctatacgccctcggtctgggattatatcgtgactgtgccggcggccgcgaaggagctgagtatctgcgcaagcgtgtatgacgcggatggcgcgtaccgcgaccatgggcagaccggttaccgtgtgtggctcggtgagcgggagctgacctccggcgaagctgcattggtggccttgtgcggcgatactacgccggaaacgatcacactgacggtgacgaatgattttgcggaaggcgtttcgagcaactatacgatcctcgtacagaaggcaaagccggtccgcttcacgccggagctgacgccggaaacggcgttgctgttcctgcgggaggatctttcagggcggcgcgtttggccggatgaaatcggcgcatttgagctctcggaagggttttcctacagctatctgctgacgtgcgcgggctatgtcggaagaaccggtacgctcgggaccgcgcacagcggggacggcgagctgatactgcgtatcgatacgactgatattgtggtcaaagacggcgcggcctctgcccaaatggcgcttcaggcggcgaagccgaatcagacgctgaagatgctgccagccgagtgggccgatttccgcgggacgagctatgcggcggacggcacgatgggcggcagcaaaggcacgaacaataccgtcctttctgtgaaaacgccgatcacggctgagggctcgacgctctactgggccagtaaactcggcgatgggtttgacagcggcgcgacgggctgcccactgctcgtggacgatgtgctcatcacctacgccgggagtacgatctaccgcgtcgacccggtctcgggcgagattctgacgcaggcggagatggaccgggcctcgagctttgccatcacgccgccagcctatgccaagggcatgatcttcgttggtctggccgacggcacgattcaggcgtttgatgccaagacgctgaaatcactctgggtctatcacgatccgctcaagggtcagccgaactgccccatcacgatctgcggagactatctctacacgggcttctggcgcggtgaggaattcacggcgaattttgtctgcctgtccatcacggatgaacagccgctggaggagaaggaggaaaagacggcctgttggtattggacgcagcagggtggattctactgggcaggcgcgtatgcctgcgaggattatgtgttggtcggcacggacgacggcgtcgacggctaccgctccaagaccggcagcctgctgatgctggacgcaaagactgggaggctgctcgaccagtggacgggtttgctcggcgatgtgcgcagtacggtctgctatgatgcagaaacggagagcttctattttacgaccaagggcggatggttctgcggcgtgcagacggagcagactgcggatggctggcggctgaaggagcggagcaaatggacgctgaagctggaaaacggttccgatacggagccagccatgagcacctcgacgccgacggtctacaacggcagagcctacattggcgtcagcggcgcgctgcaatttggggcgttcagcgggcacagcatcacggtcgtcgacctgaataagcgggacatcgcctataaagccgaaacgctcggctatccgcagacttccggcatcctgacgacggcatacaaagagacaacaaagcacgtctatgtgtacttcatcgacaactatacgccgggcaag

SEQ ID NO: 2209 - DNA, 600 bp, Unknown
  Unknown gut bacteria
cgcagcggctacggcatcacctccgtctgcatcacgccctctacagacaccgattggggcgaaaattacgtggacgaactgctcggcgacggcgagagcgttctggccgtgctcggcacgtacaaggaatccgagatccccaccatgtggaacatccttgtctacggcgaagaggattacatcctgtacgacacgagcgtcgacgagctggatttcgagctgacgggcggcgactatgtcgtcttcctgccgccggagggcgaagtgcccatcgagatcaccaaccattacaatccggacgaatacgacgagacacccgaggattactcggatgatctgacgggctataccttcgaagaggaagaagatctgtctgtcggactcgcgccctttgtcggctgctggaaatatgacgaagaaccgttctacctcgtcatcggcgacgattatgagtgggtcgccatcaacctctacggcgagcgcgtcaatcccggccaggtcgtggtgcaggagggcgatatcgcgctctatctgcccgatggcaattatttcaccaccctcaacgagacggcctacggcggcctgagcgatgaaaagggc

SEQ ID NO: 2210 - DNA, 807 bp, Unknown
  Unknown gut bacteria
cagccggtggagatcgtcgccgacgggttcgacgcaagcgaagtcctgtccgacctgcacgccaagcgccgcaccccctccaccgacgcgcacgtcgaattcaaggacggagcataccagatcgtcccggagacacagggaagcgaaattgacgacgaggcggtcaccgccgcgctccttgccaccctgtcagcggaagccctgccggatctgcgcggaacttcagccgaaccgcagacggcagcgctcgtcatcgatgaaacattatacataaagcccgaaattacgatggataccgttgaatatgacccgcccgcgctcctcgccgccgatctctccggccagacgctcgacgtccacatcggcgaacaggcccgcggcctctcggaaaccgcactttctcagctgctttccgcctcggcggacggaaaactgtccgttgattcggacgctttgagtgccatcatcgataaatgggcagaagattgtgaccagcactatgtggactatattttctccgcttattccggcaaaaaagttccgatttccttcctgaaggtcgattacaccgtcgaccgccctgccctgcttgaggccctctccgcccagctccttgcgctcgacttctccgacctcaattctccgatcaattgtaccagaaatggcgaagaattctccatttccggcacttatgtcgaggtagatattgacaatcagaccatgaccatgtacaaggattccaagtgcatcgtccacaccagcgtcgtcaccggcgccctcgacggtcatcaaacccccacgggcttc

SEQ ID NO: 2211 - DNA, 1092 bp, Unknown
  Unknown gut bacteria
aacgctctgccgcccattggagtgatcctgtgggcggcttctttgatgaaatgcgaagaacacttacaaacaggagctgatgctatggaacagcgggtaagaatttgtgatattgcagaggaattggggctgagcacagcaacggtttccaatgtgatccacggaaaaacgaataaggtttccgacgcaaccgttcagcgggtgatggcgctgctggaacggcggcagtatatccccagcatggccgggatcttgctggcacaaaaccgctccggaatcatcggtgtgttcatccacgagcacgagaaatatgagggccatacgctggaggatttctttatttcttcctcgctgaactgcctctccgctgaaattgagtccaatgggcaatttatgatggtgaaacgggcaaagcatgcggaagagatcatccggtttgcatcgatgtggaatatggatgggatcgtggtcatcggtttttgcaatcaggattataccgatctgcgcagccatatgcggattccctttgtcgtttacgatggcgattgtgcgcatccggagcgaattgtgaacatcaccattgacaatttcgacggcggatatcaggtgggccgtcacttccgggaattggggcatgcagctgccctctgtatttctgacaacgccatctgcgtggatcggaagcgctttcagggattctgcgcaggttttgcccccggaaaggccgagctgttggtggttcccatgcagaaggagccgcgctgggaattttaccgggcacagctgcaccggctgcggcaggtctctgccatctttgcggtatcggattattacgccatagacctgatgcattttttgacggcgcatggattttccgtgcccggggacgtttccatcgcaggctttgacgacacgccgatgtgcgaaatggtgcatccggccctgaccaccgtcaggcaggacggcgccctgcgcgcaaaaattgccgttgaaacgctgcgggagctgcggaagggcgcacacatcgatcctgagatcagattgccggtcttattggtggtgcgcagcagcaccggaaagcggaatacgtga

SEQ ID NO: 2212 - DNA, 963 bp, Unknown
  Unknown gut bacteria
atcatccacaaccgccacgtggtcgagcgcttcgcacggctcggcggtcgcgagatcgcgtcgccggacgaggcgcagcccggcgagacggtcatcttgcgggcgcacggcgtggaaaaggcgatgcaggaggaactggccgcacggggccttgaagtcatcgatgcaacgtgtccgtttgtggaaaaaatccaccggatcgtacaaaaggcggagcgcgaaggccgccgctgcctcatcatcggcacgccggagcacccggaggtgcgggccatcgcgagcttctgcaccgggccggttgtcctgcaaagcgcagaggaactgcaaaaatggctcgattttgacggcacgcggcgcgatctgccgctgacgatggtctgtcagacgaccgggacgcaaaaaaattgggattcctgccgcgaaatcgcaaaaaaaatctgtacaaatctcgaaatctttgatacaatatgcagagctacggaaatgcgacaggaagaagcaatcgggctttccagaaaatgtgatgcaatggtcgtcgtcggggatgcaagcagcgccaacacgggcaggcttgccatgatctgtaaacagcactgccggacggtgacgctggtcgatcatgcgggcgacctggatctgggtcttttttccggcgcagctacgataggtatcacggcaggtgcgtcgacgccgtcgtggataattaaggaggtaaacaacaaaatgagcgaagaactgaaagttgaaactgcacaggaggagaattttgccgagcttctcgagcagtccctcaaaactttgaataatggagataaggtcacgggtaccgttatggccatcggctcgaccgagatccaggtcgatcttggcacgaagcacaccgcgtacatcccggttgaagatctgaccagcgatccgtccgtcaaggtcgaggacatcgtgcatgtcggcgacgagatcgaa

SEQ ID NO: 2213 - DNA, 1323 bp, Unknown
  Unknown gut bacteria
ggctggatggacgtcaaggtcatcatcgactcgtttgccaaaaaacacaatctcagccagattatcgtcgtctgcgacgaaaagaatccccttggtctctccaatcagatccggtttctcccctctgccgtcacgccggagctgctgcgcagcgccctccgcgccataaaagaagcgctcaccgccgcagttcccggcgatttctcctccggtcaggtcgggcaggcacgcgatctgctgctgcaatatgctgcccgcgtccccagttcgcgccttgtcatcgcacggctctgtcttgagcagccgtgtcagacgcccgccgccagtctgcgcctggaggaggccttccgccgctacctcaatcccgaagcgttcttctatcaggagtctgttttcagctattgctttctgctcggtctcagtgccgtttccatccgcgatcagcttcagctgatcgaatacgccctccgcaagctccgcggtgaagccggcacgatgctccactgccgcgccgcgctctttctcagcgaccttgccgatccgaccagtgttgtctccgaatacgagacgctcctcgctctcgagccgcagcgctttttctgcgatgactggccgatcatctcccgtgccctctgtgagcagagctatgccccgctgccggatcatgctgcgctcagcgcgctgcaaatggagctgatgcaggccacgctcagcggcagcggcgataagatcatccggctcctccatacgctctaccgcaacaatctcaagcgttcacgcgatctaaaagccttccgcgtcgcggaggcgcagctccgtgaggtgctgggttgtatctattccatctcgcgccgcccgatggattccgctcccgcgcaagagcctgcgctctggtcgattgaagacgccatggagcggcagatccacgcgttccgccgcgccatcccgctgcaaagcaaggagtccggcagtctcagtccgctggtgctgcgcacgctcgagctgctcacgcagcgccacgaccaaaccgtatatgtcggcgcaattgccgcagagctcggcgttaccgactcccacctcagccgctcgttcaagcagcagctcggcatcggcatcgcagagtatatccgctacgtccgcgtctatgccgcagccgccgagctctgcaccggcgacgcccgcatccgcgacgtggccgagcaccacggcttctccgattccaagtatttcagtaaagtattccatcaggttcttggccttacgccgagtcagtggttgcagcgccacgcgcagtcgggcgcagcgcaggaggtgctcgcatga

SEQ ID NO: 2214 - DNA, 705 bp, Unknown
  Unknown gut bacteria
atgaagcagaaactcaaagacagctttctctatgcctttcagcgcagcatgcccatcatgatcggctattttgcgctcggctcggccaacggcatcctgatggcacagaagggctattcggtcggcctgaccggcattgccagcctgtttatctacgccgggacgcagcagatgctgctctccgggtggctcgccgctgggacgccgatcctcacgatcgcgatcacgtcgctgctgctcaacagccggcatctgttcttcggcatctcgtttctggaaaagttcaaggaatacgggccgtggaagtattttctgatctacggcctgacggacgagagctattcgctgctctgctcctacatcccgcgcgacgatgtggaggaaaaatgggtgcatattttcgacacggcgctgatttggtcgtactggattctgttttcgatgttcggctgcctcacggggacgcttttgccgtttgacatgacgggcgtggattttgcgatgacggcgctgttcatcgtcattttgatcaatcagctggagcactgcgaaagcaagctgcccgcagcggtgtcgtttgtgtcggcgctggcctgtctgctgatcttcgggccggacaatttcctgctgccgtcgctggcggcgacggttgtggctttgatcgcgtttcagggccgtctggaagggaaggtgcgcgtggaatga

SEQ ID NO: 2215 - DNA, 723 bp, Unknown
  Unknown gut bacteria
acagaggacggcgtcctctattttgcacgcccccagaacacagatttgcccacgccgaatgtcaatgtccccatcctgatgtaccacgccgtcggcgacgaaacgtggggctattccgacctctttgtccgcccgtccgaactggaaaatcacctgcaatacctcgcggacaatggctatgagacgatcttcttcgacgatctttcgcacctcgaagattacgaaaagcccgtgattttgacgtttgatgacggttatgacgacaattatacggagctttatccgcttttgcacaaatatcaggccaaggcgacgatcttcgtcattccgcgcgatcttggcaaggcgcataagatgactgccgagcagattcaggagctggcgcagtctggactcgtctcaatccagagccacacgtggtcacacgggaacctcagctgcatggacgaggccacgctcatttttgaaatggagcacagccgcgacgccatcacggccctgaccggcgaaatgccgtctgtggtctgttatccggaggggacgcgcagcgacctctccatcgcggtcgcgcggcggtattatcaatacggtctgctgatgaacggctacacgtggaacacctcggacgacccattctatgtcacgcgcatgtacatcccgcgcggacagtggagcatccaatggaacgtggaaaaggccgggacaagcgatccctggcgttga

SEQ ID NO: 2216 - DNA, 1401 bp, Unknown
  Unknown gut bacteria
atgtccaacatcgaaaagcaagcggaacttgccacgaacatcaagctgtcgttccggcagcgaatagactactccatctccgagttcggctacaactccatctactactggatcagcgcctttatggcggtgttcctgacagaccagatgggaattgccgccggagccgtctcgtttctgacgctctttgtccgcatctttgacggcatcaacgacccgatcatcggctccatggccgaccgctcggtcgataagggcaaaggcaagtacaagccttgggtgcgctggggtgcgctggccatgtccctttccatcatcgccctgttcgccatgcaggcttcctggagctacaccttcaagatgatctacatgtgggtcacctacctgctggtcaccattttctccacctgttgtaatatgcccttcggcgcgctgaacggcgttttgacgtccgattccggcgaacgcgccaagctgtccggcctgcgcatggtcttcgccaacgtcggcgcgagctgggccggcctgattgcagtccccctgatcgtgttcttctccggcgtgggcgacggcaccacgcagaccccgcgcggctatctgctggccgtcatcgtctgtgtcgtcatcggtctgccgccgctcttctggtcttcctataaggtcaaggaagtggtcaagccgccgaagcatcaggtcaagatcccgatgaagaagcagtttgccgccttcttccagaacaaatacgccatcatcatcgccctcagcttcttcatgatcggcttctgtgcctatggcaagatgaccgtcatggtcttctacttcacctacgtctgcaacaacgccgctctcgtctccatcgccgcgacgctcggcctcgtcgccgcgatcgtcggctccggtttcgtcggttcctgggtgttcagttggctgaagaacaagggcacgtgcctcatcttctgctacggcctcagcggtctgttcgctgtgatcggctacttcctcactccgggcagcaccctctggttcattactttcgccatttctcaggtcatgcattgtgctggtatcggccatgcctacggcattgtcggtgatacggtcgacgtcggcgaatacaaatccggcgtccgtgtcgacggcttcatctcctccttcgtctcgctgatgatgaaggcaggcggcgcagtcggccccgcggtcctcatcgcgtggatgggcgctgcgggctatgtgccgaatgttgcgcagacggccaccgtccagaacgtcatgaacatcggcatgaacctcatcacgggtctctgctgcctgctcatcgtgatcttcaacctgttcttcgacctcacgccggagaagcatgagaagatccgcctcgagctggagcgccgccgtgcagaataa

SEQ ID NO: 2217 - DNA, 831 bp, Unknown
  Unknown gut bacteria
tcccgcacggtcatcgtgctgctggccatcctgttcgcgttcctcttcgtcatgccgacgctgctcaccatcacgaactcgttcatgacgcagagcgagatcacggccaactacggccaggtcttcgacaacgccaaggacggcaaaagctacatctccaaaaccatcaacctgaaattcattccggacaaagtctcgttcagccagtattggacggtcctgctcaaaagcccggattacatctataagctctggaattccatcatcctcaccgtgccgatcgtcttcgcgcagctcatggtcgcgtccatcgcggcctacggcttcacgcgctggcgcggcaaggtgcgcgactccatcttctttttctacgtgatcctgatgctcatgccctatcaggtcacgcttgtcccgaactatttggtctccgactggctcggcatcctgcacaccaagtgggccatcctgctgcccggcgcgttcgcgccgttctcagtatttctgctcacgaagttcatgcggcgtatcccggtatcgctgatcgaatcggccaagctggacggcgcgggcgaatggcagatcttctggcgcatctgtatgccgcagtgccgcgcggcgctctattccatcgccattctggtctttatcgactattggaacatggtcgagcagccgctcattctcctgccggatgcgtcgcagcagccgctgtccgtctatctgtcgcagatcaacgccggcgagatcggcattgccttcgccgccgccgtcgtgtatatgatcccgggtctgctgctgttcctgcacggcgaggcgtatctcgtcgagggc

SEQ ID NO: 2218 - DNA, 477 bp, Unknown
  Unknown gut bacteria
atgatagaaaaagaaatctcccgggcgacgcttcgccgtctgccgacctatctctcctatctgaaatcgcttcctgccgacgcttcggtcaatatttccgccacggccatcgccgcagggttgaatatgggtgaagtccaggttcgaaaggatctcgcgctcatcagcgacggcggacggcccaagatcggatataaccgcgaacgcctgattgaggacattgaggtatatctcggatatgataacacgaacgatgccgtactgattggcgcgggaaagctgggccgcgcgctgctgggctattccggctttgcggagtatgggctgaacatcgtcgccgccttcgacgcaaacgacgcactgatgggcacgaccaaaagcggcaagccagtcatggatctcagccgtctgcccgagatctgccgccgttataaaatccagatcggcattatcaccgtccccgccgaacaggcacag

SEQ ID NO: 2219 - DNA, 948 bp, Unknown
  Unknown gut bacteria
atggaatattacatcggaatagactccggcggaaccaagaccgagtttattcttgcggacgcggagggttctgtgatttcccgcgctgttgattccggctgcaacccacttgacatcggggccgatccggcgcgcgagatcattttaagaaacgtaagacagctcgacgctgcggcgcccggcccgatctgctccatatacgccggaatcgccggcgccaatcacgtcgacatgcacctcgaaacgcttctcgcgcaggagcttggcggcgcggtggttcgcgtcgaggacgaccggcgcatcgtagtctccagcacgctcgggcatgcggacggctgcggcatgatctgcggcaccggctcctccctgtccattatcatcggcagcgagcccatccgtcaggtcggcggtctgggctatctgatcgacaccggcggcagcggctatgagctgggtcaggccggcctcaaagaggcctgccgctatctcgacgggcgcggcgaatacaccgtgcttgccgacctgatcacaaaggcgcttggcaaaaagccctgggacagtctcgcgaatatttatgccggcggccgttcctacattgcgtccttcgcacataccgtgttcgagggtatggagatgggcgacgccgtgtgcaggcgcatcgtggaagaatccgcctacaagctgtccgagctgacattcgcggccgagaaatactttcccggcgaattcccggtcgtgatgtccggcgggattttccgcgcctacccgaaatatgtccagctcgtctgcgccaaggcttcgccgaaagcgcgcatgatcctggcggtcgtcccgccggtctatggcgcgctggtggaggccatgtggcaaaatggccgaaccgccgatgccgccgtgcagcggaattttatgggcagtatccagcggctcgagagccgcgtcaattaa

SEQ ID NO: 2220 - DNA, 807 bp, Unknown
  Unknown gut bacteria
ccgcagacgcaggaacgggaaacaccacaagaaaaggggcctgaaatgccggaatcggcctcgacggctgcaaacgagctgtttcaaatgctgctggacgcagcctgcccagcagggagcgcggtgcgattcggcgcgtggctggatgcgcacccagactacgcagacaccgtgcaggacgcatcctgcgaatacgcggctatggaaaacggcacggagcgggtgcgctttctgaaaacgaattgcgaccgcttttcgcgttatgccgcagatgcgtcgcaaaccgtcgtctatcagctctggcttgtggacggcgaggttcgcgggggcgtcagcggcgcgctcgagccggcgccagcagaatgggaaccggcggagtgggaaaagctcgccgggtttttcgtggcggaaccgctctggacgatcgatcttgcatcgctggatggtttttacgcgctggctcctgccgatgcaaacgggactgcgtccggctgcgcagccccggacagcggcctctcggtgtattccgatggctcagtcacgctctgcttcacggaagaagcaccgggcggcccggagatcctgctgcacatccacgtacagtccggcgatgcggcatatttgggtgtgcggctcggcgaccgtgtggacgccttggtcgaagcattggaaacccaaaacgccgtcccgggcgagcattggatcatcgaccacgacgactgcgctgcggatggccccggcaagtccatccgcttcccggaaacggacggacgtatcacggagctgttcctgtatgcttacagataa

SEQ ID NO: 2221 - DNA, 558 bp, Unknown
  Unknown gut bacteria
ctgacgtccatcgggaagatcctgtcaccgctcatttcgggcgtggtgatcgcgtttttgctcaatccgctggtcaattttgtggactgccgcctcgagccgctcctgcaaaagaagctcaaggtccagacggcgaagaatctcagccgcgcggcaggcatcgtgatggcactgatcgtggcgggatttctggtgtatgggttctttgcgatgctgctgccgcagctctatgagagcgtgatgaacatcgtggataacgcgagtacatacttcaacagcatcgagacctgggccacgaacattctggaggacaatccggaaattcagggctatgtggacaagggcctggagcagctgcgcggcttcttcgaaaactgggtaaagacgacgttcctcagcgatatgtcgaagctggtgacgacggtgtcgacgtcggtgatcgcggtggtgaagagcctgacgaacttcatcatcggcctcgtggcgtcgatctacatgctgtggtcgaaggacacgttccgcgcgcagacgaagaacatcatggtcgcgacgatgcgt

SEQ ID NO: 2222 - DNA, 780 bp, Unknown
  Unknown gut bacteria
atgagtattcttgaggtcaaaaatctgaccattcaattcggcggtctgcgcgcggtcgacgatttcaacctgagtctggaaaagggcgagctggttgcggtcatcggcccgaacggtgccggtaaaaccacgatcttcaacatgctgaccggcatctcccgcccgacggcgggctccatcgagctggaaggcgagagcctggtcggcctgaagccctatcagttcgcgcagcgcggcatcaccagaacgttccagaacatccggctgtttgccaatgcgtccgtcgcggacaacgtcaagatggccgccacgatgcacggcaaggacaacctggccagctgcctgctccgcacgcggaagatggtcgagcacgaacgggagctcgacgagaaggtcatgagcctgctcgagcgcctgaacatggccgacaaggcggatctgctggcgaagaacctgccgtacggcgatcagcgccgtctggagatcgcgcgtgcgctgatgaccgatccgaagatcctgctgctcgacgaaccggtcgccggcatgatcacgacggagctggaggagatggcgcagctggtcgcaaagatccgcaaggacttcaatctcagcatcatcatgatcgaacatcacatgaactttgttatgccgatcgcggaccgtatcaaggtcgtcgacttcggcaagaccatctcggaaggcacccccgacgtggtgcagaaggacccgaaggtcatcgaagcctatttgggaggaggataccagaatgtcaatgcttga

SEQ ID NO: 2223 - DNA, 801 bp, Unknown
  Unknown gut bacteria
acgctcttctcctatgtcgaggacatggtccgtgagcagatcgccgcgcagtatgccgaagccacgcgcgcccagctctcgtccatgaccgtcgaccagctcgccgctgcgctcgacatgacgccgcgcaccgaggagcagacgcagtacctctacgacaactacatgcccgcgaccgtctccgattcgacgtatgacgacgtgctcgccgcgctcggctatgtggatctcgcatctccttcgaaggtcagcctctacgccgcgaccttcgcggataaggacgccatcgccgactgcattgcggactataacaaggccgtctccgacgaacaggagatcacgtataccgactatgtcgcgctgctcatgagttcgatcaccacgatcatcaacgccatttcctatgtgctgattgcattcgtgtccatctcgctcatcgtctcgtccatcatgatcggcatcatcacctacatctccgtgctcgaacgtacgaaggagatcggtattctccgcgccatcggcgcgagcaatcgcgacatctcgcgcgtcttcaatgccgaaacgctcattgaaggtctcatcgccggcctgatcggcatcggcctgacgctgctgctgattattccgatcaacgccatcgtccagcacctgaccggcatcgccagcctcggcgcggtgctcccgccggtggccgccgtgctgcttgtcgcgatctcgatgctgctcacattcatcgcaggactcatcccctcgcgctttgccgcgaagaaggaccccgtcgtcgccatccgcaccgaataa

SEQ ID NO: 2224 - DNA, 879 bp, Unknown
  Unknown gut bacteria
atgggccccgtgatggaggccaagggcaccgttaccaacgagattctggaaatgatcgaggacgatcccagagtatgctatatcaacgcggatggcaccggccgcggcggccgcgtccagcaggcgcagctccgctatccggatcgcatcctcgacgttggtattcaggaaatgaacatggtcacgatcgcggcgggcctcgcgaaggaaggcttcctgccctacgtgcagaccttcggcccgtttctctgcgtccgtgcgctcgaccagatccacaacgacgtggcttacaacgactatcccgtccgtctcatcggcacccacgccggtctgtcctcgggctatggccccacgcacaacaccatcatcgagttcggcgttatgaattccctgccgaacatgaccatggtggccccgtgcgacgccgagcagtgcaagaagctgctccgcaagtccctgaactatccgaagcccatctacatccgcatcccgcgtggtgaagagccgctggtctacgccgcggatcatgactatgactacgagatcggcaaggcgatcgtgattcaggaaggcaccgacctgaacttcatcgcgaccggcatgggcgtctacaactgcgtccaggcggcccgtcggctcgaagagaagggctacagcgtcggcgtcatcgacatgcacaccatcaagcccatcgacaaggacgccgttgtccacgcggccaagctgagcggcaacatcatcaccgtggaggatcacaacattctcggcggtctgggcagcatcgtggccgacactctgctcgaggcgggcgtgtttgccaagctgaagaagatcggcgtgcccgacaagttcatcgagttcggctatccggaagagatc

SEQ ID NO: 2225 - DNA, 606 bp, Unknown
  Unknown gut bacteria
atgcaggaaaggatcgccatgctcaaactaccaactcgacaaaccgcgcatccggacgcaaagacgctctggaaaaacgcgaatctgaaggttcgggattttctgaactccatgtgcttctccgggccgagctttctcgggatgctgatcttctatctcgtcccgtttggcgtggtgatctactattcgttcatcgcgggcgtcgtggacaacagcttcgtgggcctgaaaaactatatcgccgtcttcaacaacgccccgctccgtaccgcggcgaagaacaccgccgtgttcacgggcctcgccgtgccgctggcggtggtgctgtcgatgctgctggccctgatgctcgaggcccgcatccccggcaagagccagttccgtacctgctttttaagcccgatgatggtgcccatcgcgtccatcatcctgatctggcaggtcttgttccattcgaacggcgtcgtcaacgaattcctcatggtcttcggcgcggacaagatcaactggctgaaatccgactattgcatggtcgtcatcgtcagcctgttcctctggaaaaacctcggctataacatgattctgttcatggccgcgctcaacaac

SEQ ID NO: 2226 - DNA, 1593 bp, Unknown
  Unknown gut bacteria
aggggcaatgtcggcgcggagaatgcgaagcacgttggcggtattgtgggcgatatgcagaactatgccgtcgtttgcggcagctataacaccggctccgtcaccggcgcggactatctgggcggcattgcgggcgaggtctatgtggcgtctgcgccgcttggctgctacaacacgggcgatgtcggcatggccatgcactgcggcggcgcgctcggcagcttcggcggcgatcagtacatcaccgtggtgaagggcagcttctacaaggggccgctctccgaggcgtacaaggccaacggcgcggcgctgcgcacggaggcgcagatgaagctgaccggcttcgtgacggagctgaaccgcgaggcagcggtcacatgctatgaaaaggacgcggcgctccgcaacgacggctatcccgtgctcacgtgggagagcgagggcttcctgatcacgctggacgcgaacggcggcacgtgcaaacaggaggactgctacacagaccgcgaaggccgcatcggccagctgccggagccgtatcgctggaactaccgctttgacggctggttcacggaggagaccggcggcgacgccgtgacggcgcagaccatcttcaccgaaaatacgacgctctatgcacactggacgatcatccggccctcgaccggcagccagggcacgaagaatgtgtatttctccctgtcgaaggacggtgtctatgtgacgggcaatgacagcgagcatacgctgctggcgtccgtaccggtggaggtcagctggttcgatctggagccgtatgggctgggcgcgtacaccgtgaagcgcggcggccgggtcgtgaagcagccgacgatgctgcatctgatgatccggatgctggagacgtattatctggaggccgggcagacgctgacaaacaataccgatgccctgacggccagcggcagcttcggctcgctctatttccagaaattctggggcggcggcgagaacctgacgtacttcctcaaccatgcgttcccggtcatgtatccgggcatgggggcgacagcggactatatgacgctggaaaacggcgatctggtggagcttggcatgtttacaagcggggaattctatacggatgaaaaggctggatatccctatttcgtccggcaggacggcacggcggccgaccgactgacgctggcggcacgcgaggcgcagacgctggtgctgcatctcgcgggttccgatatgtacacggcggcgccgaaggatcagatcctcagaaatacaaaggtctatgtggcgcagcagccgaaaactggcgacgcggcgcagtggacgctccttggcacgacggataaggacggtgcgctgcgcgtcagcttccgtcaggcgggaacgtattatgtggccgctgcgggcagcagcgtcagcgctcccggcgtctgcctcgtgaccgtgacggcggacgaggtgtcgcgcgtggagcaggtgatcgccgcgctcccggacgcgaagaatgtcacgacggacgacgaagtggccatccgcgcggcgcgcgcggcctatgacgcgctggaagcggcggagcgggcacaggtggag

SEQ ID NO: 2227 - DNA, 1146 bp, Unknown
  Unknown gut bacteria
atgaaaaaacatatcgcactgttccttgtggttgccatgcttttggccctctgcgcctgcacctcgcagccggcaaaggacaccacgtctgagcagaccaccgctgatgccagcagcaacagcgacgccgccgccaacaccgacgacagcaccgaaaccgccgcgccctccggcgagaccgttaccatccgcgtttccggcctcaaccagcagctcagcctcccgctgtggtacatccacgagcagggctgggacgttgaaaacggcttcaaccttgagctgaccgttttcgcgcagggctccggcatcaacgaagcgctcggctccggccttgtcgacgtgttcaccatcggcgccgccggcatctcctcctgctctgtctacgacgcggtctacctctattcccatgaggactccggcgccggccagaactttgtcgtccgcgccgacagcgacatcgcgcaggtcaagggcgagctcgccgactatcccgaagtgtacggcagcgccgacaccctgagaggcaagaagttcctgctcccgatgggcaccgccgcgcagatcctcgccgacgtgtacctgcagcagttcggcctgacggaggacgacgtgaccctcgtcaacatgaatgacgactcggcctatcaggcgtttgtctccggcgaagccgatctcgccaagacctcctaccccaccactgacaactatgacccagaaaagtacgtcactgcctgcggcatggcgacgctcggcgttccgtattacgacaacgtcctctgctcccgcgcattctttgaggacgcttccaagcacgacgcgctggtcagcttcatcgttcagatgatccgcaccgccgaaaccttccaggacgacgacgttctgatgcaggcgatgctcgactactatgagttctgcggtgtcagcgttgacgctgaggcgatccgtcatcaggtcctcgagcgcccctacttcacctatgagcagctcaagaccaccgacacctccgcttccttcaagctccttgccgacttctatgagcaagtcgagaacatcaccacggaagatcatgataaggtcatgaacaacatggacaccaccatcctcgccgaggctctggatgcctacgctgcacagtacgtgaaataa

SEQ ID NO: 2228 - DNA, 630 bp, Unknown
  Unknown gut bacteria
atgtccgccaaggacatacaaaaaataattggaggaacaaaaatgaaaaagatcattgcgctgctgctggcagtcctcatggtcctgagcatggttgcctgtgcatccaagaccaccgatgatacgcccgcagatacgaccccggctgacactaccccggccgacaccaccaccgaagataccgaaaagaccgacgagcccgcagacaccaccacggacgcagagcctgtcgagaccgatggcgaatacgccgtcgccatgatcaccgactatggtgacatcaccgaccagtccttcaaccagaccacgtacgaagcctgcaaggcgttctgcgaggccaacggcatcaccttcaactacttcaagcccgccggtgacaacaccgctgaccgtgttgccatgatcgaaaaggctgtggacgaaggctacaacgtcatcgtcatgccgggctatgccttcggcggcgccatcgtcgaggctgctccggaatacaaggatgtcaagttcgtcgcgctcgacgtcggcaagggcgatctgctcgaggccggtgttgccgctgctggcgagacctacgactacaaccccgacaactggaacctcgaagactatgttgacatgagcaatgtctac

SEQ ID NO: 2229 - DNA, 528 bp, Unknown
  Unknown gut bacteria
gtgcaggatatgggagaaagaattccggaaaacaagatggggacgatgccggtcggcaagctgctggccgatatggcgatcccgatgatgatctcgatgctggtgcaggcgctctacaacgtggtggacagcgtgttcgtctcgcgcatcagtgaaaacgcattgaatgccgtgtcgctggcgttcccgctgcaaaacctgatgatcgcctttggctccggcacggcagtcggcatgaacgcgctgctctcgcgctcactcggagcgaagcagcaggagcaggtcgaccgcgcggccaatacgggcatgttcctgttcggctgcacctacgtgctgttcgcgctgatcggcgcgtttttgtcccgtccgttcttcctcgcgcagacacacgacgcggagatcgtgggctacggcgtggactatgcgtcgatctgcctgatcttctcgttcggcatcttcgcgcagttctgcttcgagcggctgctgcaatccacaggccggacaaagctgtcgatgatgacgcagctg

SEQ ID NO: 2230 - DNA, 1245 bp, Unknown
  Unknown gut bacteria
atggctattcatgaacagacagcctccttcgacgtggtcgtcgtgggcggcggcttttccggcgtctgcgccgcgatcgctgcggcgcgtgagggcgcgaaggtcgcccttgtgcagaaccgccctgtattcggcggctccggcagctccgagacgcggatgcacatcgttggcgccaactgccattcctccaagccgaacctccgcgagacgggcattctggaggagatcctgctcgaaaacaaacgccgcaacccctatgcggacttcccggtcttcgataccatcgtctgggaaaaggtgcggatggagccgaacatcaccatcctcctgaataccaacatcgacgacgtcgtcctggacggcgaccgcatcctcgccgtcaccggctgccagaataccaccgagacgcgctggacggtctacggcaagatcttcatcgacgccaccggccacggcacggtcggcgtgatggccggggcggagagccgcatcggctctgaatcgaagcacgagttcaacgagcccacggcccccgaaacggccaacaacaataagatgggcaataccatcatgttcaccgcaatcgaccgcggcgagcccgtgacctttatcaagcccgtctgggccaatacctactctgaggaagacctgaaataccgcccgcatgtcgaccgcgtctgcgcccaggcagacggcggcggactcgtctccgtcgacgcggcgaagaaccagctgcccgagttttcgaatgtcgacgccggctactggtggatcgagctgggcggcgacgccgaggatatcattcaggagagcgagcagatccacgaggatcttctcaaggtgctctacggcgtctgggatcatattaaaaatcaggccgaccacggcgcgcagaacctcgacctcaactgggtgagcaccgtgcccggctgccgcgagagccgccgcctcgtcggtgattacctcctcaatgaaaacgacgtccgcgccaaccgcgtctttgacgatgccgtggcctacggcggctggccgatggatgtccatgtgccgggcggcgcgaaggatctggcaagcgttggctccctcgtctataacttcgagggccattattccatcccataccgctgctattacagccataacgtcaaaaacctcatgctggccggccgcgatatcagcaccaccaaaatggccttctcgtccacccgcgtcatgggtacctgcgccgtcggcggtcaggcc

SEQ ID NO: 2231 - DNA, 582 bp, Unknown
  Unknown gut bacteria
atgccgagacgcagactgctgttacaccatcaccagaccgcctatgagccggagacgctggagctgccggaagaggtggtcatcccgaagaaaaacgcgccgagcgtgaacggtacgctccgccagacggcgctgcgtgtgccggaggtgacgtggcagtgcagcgggatcatggtgttcgggaagaaaatccgttcgctggtcttctcgaccgacctcgctatcattaaaaacatcaatgccgacgcggtcatcgcggtctatccgttcacgccgcagccgatcatcaacgaagcgctgctcatggcatcggacatcccggtgttcacaggcgtgggcggcggactgacgaaggggcaccgcgtggtgaatcttgcgatgtatgccgagatgcagggcgcgatgggcgttgtggtcaatgtgccgacgtcaggactcgtcatctcgcggatgcgccggacgatcgacatccccatcgtcgtaaccgtggcaaaccatgggacggactatgcccgccgcattgacgacggcgcggccatcttcaacgtcgctgccgggagcgccacggcggagatcgtcgcg

SEQ ID NO: 2232 - DNA, 450 bp, Unknown
  Unknown gut bacteria
atggcaaatgagaacaaatccgcccagcgcggtgctgataaacccaagcgaaacggatggcgcgtgttcgggcgcgtgatcgggacgatcgtgctcgtcggcgtgctgacggtgctggtgttcgcatgtctgtttgcgctgtatgtcaaaaatgacctcgcggcgcagaacaatttttcgctcgagggcttcgcgctcgaccagacgtcggtcatctattatgaggacccgaagacggggcaggatgttgtgctgcaaaagctctacggcggtgcgaaccggacgtgggtcaaatatgaggacatcccgaaaaacctcatccatgcctgcattgccatcgaggacaagcgctttatggagcatcagggcgtcgactgggtgacaacgatgcgggcctgcttgaaaatgttcctcggcagcggcagcgccggcggctcgaccatcacgcag

SEQ ID NO: 2233 - DNA, 1158 bp, Unknown
  Unknown gut bacteria
ttgaatcagaaagcaaaggtgatcatattggaaaacagaatcaaattcacaaaatcctatgagctgtacgagcgttcctgcaagtcctattggcatggcacgacgcagtcgaaaacaccggaaaactacatcccgggccagttcccgctgttcattgaaaagtcgaagggcgcatatctctgggacatcgacggcaatcgatatacagactatatcatgggctacggcgccatttccctcggctactgcatcgacgaagtggacgaggcagccattgcccagatccgaaacggctttatgacctcgctgacaagtcctgtccagacgcagctggcagagcttctggtggacgtgatcccgtgcgcggagcgggtacacctgtgtaaaaccggctcggatgccacggcggcggccgtgcgcctcgccagaatccataccggccgggacaagatcgtccgctggggctacaacggctggcacgactggtgcagctccaagaccgccggcattccggagggcgtcaagaatctggcgcacaaatatggcgcactgttcattctggacgagatgcgtaccggcttccgcatgtcgcttggcggcgcgcaggaatactatggcgtgacgcccgatctggcgaccttcagcaagggcatggcgaacggctatgccgtctccgcgctggttggccgcgcggatgtgatggacagcctgaaagagtcgagattttcctccacgttcttcacgaacacgtcggaaatggcggcggcgatcaagacgatcgagtgcatccgcgagaagaacgtcgtcccgtatatctggaagctcggcggcaagctgatggacggcctgcgtgagatcatcaaggtcaccggcgtggaagccgagatgatcggcgtggacatcatgccctatatcatcttcaactatgacaatgcaaagtggatctctcccaccggcttctccggcgcgccggtgtttgagccgggcggcaaagtggaaaaggcatggcgcaccttctatgcggaagcggcgcagggcggcgtgctgctccatccgaaccaccactggtacgtcggaatgtcccacacagagcaggatatcgatgagacgctgaatgtctgcgagacggccctgtggaaggtaaaagaggagctgtaa

SEQ ID NO: 2234 - DNA, 903 bp, Unknown
  Unknown gut bacteria
gccatcgcggccatcgacatgggccacatcggtgaatactatgagatcacggacgagggcgtctacatgtactacgcgaaggaaaacttcacgccgaagtgctacgtgtggacaagctcgaacgcgacgcacggcaccatcaatatgcaggaggcactggccgagtcctgcaactactatttctatgaagcgggccgcctgacctacaacgcctattacagtgagacgggcgagaatccgtttgatattgtggcgaaggccctcggcctcggcgagcacacgggcatcgagttgtttgagtacaccggccagcgcgcgaacgccgagacgaaaaaggccaactacgcgggcgacgagtccggctggtacggcgcggacgttttgcaggctgtcatcgggcagagcctgaaccgcttcacgccgatgcagatggtctgctatgtgcaggcgctggcaaacaagggcacgcgctattccgcgacgttcctgtcgcgcatcgtgtcgtgggactatcagtcgctgatcaaggagcacgagccggaggtggccagcacgctggacatctcggatgaggcgctcgactgcatcgacaagggtatgcgcatgaccgccaaggtgggcacggccaagaactatctggccaattatccgatcgaggtcgcctgtaagaccggcacggcccagtggcagggcgtgacgtccgacggatctgtcagcggctccgacaacgcctccttcgtgatctacgccccggcggacgatccggagatcgccatcgcggtctacgtcgagaagggcgcgcagggcggtaatcttgccaatgtctgcatcccgatcatggatgcctatttctcgggcgagacaaaatatgaaacaatattgaccgagaatacagttcattaa

SEQ ID NO: 2235 - DNA, 1323 bp, Unknown
  Unknown gut bacteria
gaacccgccccgcaggagcagcctgcccagcccgactattccgacctggacatcggcacaaacgctgattccaattccggcagcgaaggtgaagagccgggcgataccggcgaaacggatgaatcgctcccgcttcccgatctcgacctcggcgcgaccctgacgtggtataaatacggcgcacagcccgccgccatcgcctgcacccccggcgagaccgtcggcaaacgcatcctcctctcccagctgaacaatggcatgcttccctatgacctgcgtctcaccggcctcaacgcaccggacgcccgcatcaccggggccttcttcgccgccggaaacggcgtccccagccccatcgaccccagcggctccgtcgtcatggcgctgccggacggcgcggaattccaaaattacgtctttctcctgcaagcccacgttacgcagaaaaccgcaaacggcgaacccgtcgagacggatgtggaatttaccttcctcctccgtctggagtccggccttgaccttgaccttcgcctcgcctggcggacaacgtccgcccctgcggaagccacctgcggcgcgaacaacaccaccacacgcaccgtcaagagcgacacgctcaccgacggcctcttccagtacagcttcgacttcctcggcgagagcgcccgcaccgccgaatttgtcagcgcggactaccgcgccggagacggcgaaacgggcacgttgtcccagtccggcgtcctgcaaatgtccccggctgacggacaggatcaggaaacctattttctcagcgtcacggcccgcgcctccggccagaccgtccgctattccttcgttctcacctatgaggacgggctggatctccaactgaaattctcgtggctggaacgttctgttacccgccgcgacacgctttgcgccgcaaacggcggtgccagcctcaccatcaagcacaaccagctcaaggacggcctcttgcagtatcagcttgccctcacaggccgcagcgcggacaaggccgccatcacctccgccacgctcaactctgatgcgctgagcacggacgcgggcagcatccagctccagtccgccgaaggcggcgcatcctacacgattgtcgtcaccgccgaatccggcggcaaaaccatcacattcaagctcctgctccgctatcagagcgatgtcagcctgaaaatgacctattccgtgcttgaaaacgacatcgagcggccgcgccagttgacctgcgaaaatggccgaacctttaccgccgacgttatccgggacgaccagctggcagacggcctcctgacgtatcagttc

SEQ ID NO: 2236 - DNA, 453 bp, Unknown
  Unknown gut bacteria
gtgaagatcaccgaacaggtctgggcctttgccgagcctgtggtgcaggcgcacggctgctcgctctgggacgtggaatacgtcaaagagggcggcgactggttcctgcggctctatatcgacaaagagggcggcgtcgacatcaacgactgcgaggccatctcccgcgcggtggatccgatcctcgacgagaaggatcccattcccgacagctacagcttcgaggtctgctccgccggactcgagcgggagctgaagcgcccgtccgatttcgcacagtttctcggcagcgccgtcacggtcaagctctataagcccgtgaacggcctgaaggaacaggccgggacgctcgcggcctacgaggacggggccgtcaccatccggcagggcgaaaaagaagtacgttttgaaaaatccgaggtcgcacaggtgcggcttcgcgtcgaattttaa

SEQ ID NO: 2237 - DNA, 471 bp, Unknown
  Unknown gut bacteria
atgaagatctggatgatcgtcgcggtctgcgcgttcgtatttctggtgtgcttcctgctggataccctgttcaagcatctgttcccgaagtcgaagctcgaaaagagcaagcaggccgtgcgccccgcgcggcgaagcgcgacgttcggcgtgattttgctgttcgtgccggtcgtggtgctgctgtttttcatgccgaagggcggcgatacgctgctgctcatcggctgcatcgcggcgctgattttcggcgtgatcctgttggtgaactatttttccgtcaccatttactatgacgatgagaaattcttgtataaaacgctgcgcggcgggaaaaaggaatttcactatagccagatccgcggccagcgcagcctgatgacgcgcggcgggatcaacacgatcctgttcgtgggcgacgaggagatcaacctctacagctcgatgcagaatctgaatgccttcctcaac

SEQ ID NO: 2238 - DNA, 636 bp, Unknown
  Unknown gut bacteria
tcgcaccggcagatcgtcctgacggccgaccggccgccgcatgaaatgctccgccttgaagaccggctgaaaacacgcttcgagtggggcctgattgcggacatccagccgccggattacgaaacccgtatggcaatcatcaaaaataaggcaatgagtctcgggctcgaattcccggacgacgtctgcgaatacatcgcagagaacatcacgacgaacgtgcggcagattgaaggaacagtcaagaagatcctggcttaccgcgatcttcagggcatgccgctcgacgtggcgagcgtgtcgcgcgcgatcaaggacatgtacaaggggaaagccgagagcctgccgacgccgggactcatcatctcagaggtctgccggttctattcgattgaagagcaggtactgcgcgggacgctgaaaaacaagaataccgcggaggcgcggcaggtggcgatgtatctctgccggaagctcacaaatctcagtctgccggacattgggcgcgagtttggacgcgatcattcgaccgtgctgcatgggctgaataaaatcgaacgcttgatggccgactcaacatccggactgcaagataatatccgggatattacggcgaatatcaataataagctgtaa

SEQ ID NO: 2239 - DNA, 456 bp, Unknown
  Unknown gut bacteria
atgaaacgaagacttgcctgtatcgtgctggccgcgctgctcctgctggggctgtgctgcacggcgtttgcagaagctccggccgcgacggaagcgcagctctggaacatcacgggcaccgtcggccttctgacgagcgacgaggatctgacactggaggcgcgggcggaggaaatctccgcgcagtatggcgtcgggatctatctgctgatcctcgaggactattcggaatactatgacgacccctacgagacggcgtatgagctttaccaccaaaacacgctgggcatgggcgaagaccgggacggcgtgatcctgctgatgagcatgtccgaccggaaatatgccacgttcttctatgggccgaaggcggaatacgcctttgacgcctacggacaggaattgatggaggaggaattcctcgacgatttccgggacgacgactggtacgacggc

SEQ ID NO: 2240 - DNA, 768 bp, Unknown
  Unknown gut bacteria
ggagttaagttgaagcaagccaatgtgattgaaacgaaaaaaagcggcgattctgtcgtatatcaggttcccggtgcgtttgcgctgctgtttgtcgtgctcgttgcgctgcggcgcattggagcgtattacggaacggtggatgggttccagcccgtgctctacgccacgcgtaaactggtgtgggtgtttgcggcgctgacggtggtctgccttgcgggcgcgatcttcgggaagaagacgtggatgcgtgcggtggggcgctatggcgcggtgctgatggcgctggcgctggtgagcgcgtttgtgctgagcaaatactggacggcgaagctgctgttcctctatctgctgcacgctgtggtctattgcctgtacatggtctacaagctgtatcgcggtgagttcttcgcctactcgctggcaacgtccgtctcgggctgtgtgtttttcttcttctcgaagggcgtggcgttcaacacgcgcggcatcctgctgggccttctggcgctggcggcgctggtgttcgtggcggtgtttgcggcgctggccgcgaagggaaagggcgttttgaagctcggcggcaagcaggttcgcgtgctgccgaagtcgttcaatccaatcgtgctctatgtggtctgtgcgctgtggctggtgtgcctcttgctgtgctacgtgctgggcgcgtcgttcgcgtactactgcatgtttgcagcgattgcgtttgagctggtcgcggcggtgtattacacctttcagttgaaataa

SEQ ID NO: 2241 - DNA, 546 bp, Unknown
  Unknown gut bacteria
atcgacctcatcgtactcgacctcatgatgccgcgcatggacggactcgaggcgtgtacgaaaatccgcgaattttcggatgttccaattattatgttaaccgcaaaatctgaggacatggacaagctcatgggctttgagcacggggcggacgactatctgaccaagcccttcaacattctggagctcaaggcgcgcatccgtgcgctgcttcgccgcgcgggttccaccggcaagcagcaggccgacgtgcttgcgtgcgatcacatctccatcgaccgcagtgcgcgcaacgcctataacgatggccgcctcgtcgatctgacgcagaaggaattcgacctggtcgagctgctcatgcgcaacccgaaccgcgtctattcgcgtgaggcactgcttgatgcgatctggggctacgacaacagcagcgatatccgcacggtcgatgtccacatccgccgcctgcgcgaaaagctcgaacggacgccggcctcgccggagcatatcatgacgaagtgggtagtgggctactatttcaagttctaa

SEQ ID NO: 2242 - DNA, 627 bp, Unknown
  Unknown gut bacteria
atgaacgaagcattgcgtgcatatttcccggtcgctgacatgatcgcggcgaccttcggcccgtgctgcgaggccgcgatccacgatttttcacagccggagacgtccgtcgtccatgtggccgggcaggtcacggggcggaaggtcgggcagtcgtttgaccatctcatcaaaaacgtgctgctgagcaaggattttcagaacgatcaatcgaacaactacgtctttcagacgcccgacgggaggacgatcaaatcgtcctcggtgctgctccgcgacggcgggcatgtgatcgggatgctgtgtatcaactatgatctgaccatcgggcagagcttttaccagcagatggccgcgttttacggcggaacgcaggaggacgcggccaacggcgaagtggatgcggcggacgacgtgacgagcatcatcgacggactgatcgacagcatcttacgcgggacggacgccggacagatgaaccggaagaagtgcgtcgagctggtgcggttcatggacgagaagggcatcttcctcgtgaagggcgcgatcgacaaggtcgcggcgcggctcggcgtttcgaaggtgacgatctacagctacctcgacgaggccaagggccggagataa

SEQ ID NO: 2243 - DNA, 543 bp, Unknown
  Unknown gut bacteria
atggaaaagaaagaatttcaggcggagagcaaacggctgctcgatctgatgatccattcaatttatacgcatcaggagatcttcctgcgagagatcttgtcgaacgcatccgatgcaatcgacaagctggcctaccgggcgctgaccgacgagaacgtcggcctgagccgcagcgattttgtcatccgcatcgaggcggacaaggacgcgcggacgctgaccgtgcgcgacaacggcatcggcatgagcaaggacgagatggaacagaatctcggcacgatctgcaaatccggcagtctgcaattcaagaaggaccttgaaaacgcagagaacaaggatgaggacatcgacatcatcggccagttcggcgtcggcttctattcggcgttcatggtggccgacgaggtgacggtcatctcgaaaaaatatggcgaagagcaggcttggaaatggcagtcgtccggcgcggacggctataccatcgagctgtgcgagaaggacggcgttggcaccgacgtcatcatgaagctcaaggctgacacg

SEQ ID NO: 2244 - DNA, 573 bp, Unknown
  Unknown gut bacteria
ggcggcgacgggacgctcaacgaagcgatgagcggattgatgcagctggagcgccggcccccgctcggctatattccgggcgggacggtaaacgatgtggcctcgtcgctgggactctcgcgcgacccggtcgtcgccgcgcaggacatcgtccacggcaagccgttcgccatcgacatcggcgcgttcggcgaaaatcgctggttcgattatgttgcggcgttcggtctgttcacgaacgtcccgtatcagacgccgcaggtcgacaagcggatctggggccggatggcgtatttcttcaacggcgtgcaggcactgggcgaggtacatcctgtccatgcgcgcgtcagctgggacggaaagaccgtggaggccgacatcatcgacggcctcgtgtgcagcacgacgtcggttggcgggttcaaggcgacgcgggccgtcggcgagtttgggatcagcatgaacgacgggctttacgaggtcgtgctgatccgcgacatcaaaaatctcgcggatttcagcgccgtggcggcgaagctgctgtggatggacttctccgacgagaactatttc

SEQ ID NO: 2245 - DNA, 780 bp, Unknown
  Unknown gut bacteria
cgcctgacgaccgacgtgtcgaacgtgcagatggcctttatgatgatcatccgcacggcggtgcgtgcgccgctgatgctgatcttctcggtcatcatgtccatcaaggtcggcaaggagctggcgttcgtattcgcggcagccatcccgctgctcagcttcggcctgcttctgatggcaaagtttgcgatgccgctgttcaaggccgtgttcaaaaaatacgaccgcctgaacaactctgtgcaggagaacgtacaggccatgcgcgtcgtgaagagcttcgtgcgtgaggactatgagacgaaaaagttcagcgccgcatcggacgatgtgcgaaaagacttcctgaaggccgaaaagatcctcgccacgaacacaccgctgatgcagttctgcgtctacatgtcgcgcatcctgatctgctatttcgcagcgaagctgatcgtgcagtccggcggcacctatctcaacgtcggcagcctgaccagcatgatcacctattccatgcagatcctcatgagcctgatgatgctctcgatgatcttcgtgatggtgacgatggcctcggcctcggccaagcgtatcgcggaggttctggacaccgagaccgacctcaagaatcccgcctccccgctccgcgaggtcccgaacggcgcggtcgatttcgatcatgtgagcttcaaatattctgccaaggccgagcgcaatgccctcgacgacatcgatctccacattccctcgggcgcgaccgtcggcgtcatcggcagcaccggctcgtcg

SEQ ID NO: 2246 - DNA, 1629 bp, Unknown
  Unknown gut bacteria
cgcaaatcgaagcagaaacgcgcggcgcaaagcgcgccgcagaacgccccgctcgtccccgctggcgtatccgctgtcgctgccggcagcgacccgcagccgcccgctgccgtacccgctgaccaaaacgcggagctgctggctcgcgccaaatcggcggaggaaaagctggccgagctggaggccgagcttgccgcactgaaggcacagcaggtcccggaaaattcctccaatttccatgacgattcaagcgctcccgaggcgcgcagcacggaggaagcccacccaaaagctgaggccgccggaacggcggccaagccgaaccgtcgcttccgctggtggatcatccccatcgccgtgatcgtcattgcggcaatcctggccgcggtctcgttcttcggatcttcgaagctcaaaaccgggctgaacgcctatgaactgctgaaaaactacgcaaatcaggatgtactcgtgatgcaggcggacgccgcgctgaccacgaacggcgacacctcggagacgagcgtcgacattctgcgcaccagcgcggacggccagtccatcacacgcctcacgcgcgacggcctgtcgctgtatctggcgaacgacacgctctatctcgcggacggcagcgcctgcggactcggcgcgaacgggctgatcgactatggggcactgctcgatgcgtccgtttccctgtacggatcggctgaactggaaacgtcaaagaacggggacgaaaccgtctattccgccgcaatttccggcgaagatgcgcagaagctcgcggcaattttacttccgtccatggcggacgaagcgggcgcgttgcgggaagtctccatgtcgctggccgagcaggacaggacgctggaaaatctcgtctttgagatcgcgctctccggcgaggcaaacactgccctcagtctgacgctcacgccccggcacggcgcggcggaggacgcggagatcccggaggcggtactgtccgccatgcaatccggggaaaacaccgcaaacatcaccctgactgacgacgttttccggctgctccgcgcctggcaggccacatttggcggggacgccgtctcggcagatctccgcctcaaggcggactgcggccccgtcgtcctcgacaccacgctgggcctggggcagcagcgcattgacggcatgaccgtcactggcatccagaagggtccggtcacactgtatgtttcagatggaaagattcttgattcctctggaaacgcggtcgatctcgggacaaattcgtgggcaaagtccgcgaatctgctcgacgcagcggcgccgctcctcttttcgcccacggcccgccacaccgaaaagcccggcgggcaggaggtctacaccatcgcgctggacgcggacggcatggccgccgctgcgaacgcgatcgcgccggacatcgaatctctggacattgatttcaccgaaggaaacctcgagatcgtgctgagcgggaacgatttgtccagcatcacgatctcgtgcggcgggacgctccgcctcctgctgacggacacggacgtttcattccgcgccgtcattaccccggcgggacgcgaattcgcagtcacgcagcaagtcctcagcgcattgcagtaa

SEQ ID NO: 2247 - DNA, 1026 bp, Unknown
  Unknown gut bacteria
atgctgcaagaagttatgacatcccctggtgtaattgaattccgcgacgtgcccatccccgagatccgcgacgatcaggttctggtcaaaatgatgcgcctcggcatctgcggctcggatatccacgtctaccacggcaaacacccgtataccaaataccccgtaacgcagggccacgaagtctccggcgagattgtccaggtcggcagcgcggtcaagggcctcgaagtcgggcagaaggtcgtgctcgagccgcaggtcacctgcgggaagtgctatccctgcacgcacggcaaatataacctctgcaccgagctgaaggtcatgggcttccagaccaccggcgcggccagcgagtatttcgcggtcgatgcctcgaaggtcgacgtcattcccgattccatgacctacgacgaagccgcgctcatcgagccgctggccgtcaccgtccacgccgccaagcgcttcccggacatcaacggggcgaacgtctccatcatcggctgcggcccgatcggcatcctgctcatgcagtcctgcaaggcgctcggcgcggcgaaggtgctcatcaccgacatctcggactatcgcctggagctggcaaagtccctcggcgcggactacgcgatcaataccgccaaagtcccctatgcagacgccatcgcagaggttttcggcccggataaggccgacgtcacctacgaatgtgccggcaataacgccaccacggacatggccatccagaacagccgcaaaggctccgtgatcgtcctcgtcgccgtctttgccgactgggcaaaggtcgacctggcccgcctcaatgactccgaactcacgctcgatacctccatgatgtaccggcacgaggattatgtggacgcgctccgcttcgtcgccgagggcaagatccagctcaagcccctcatcagcaagcatttcgccttccgcgatttcctgtccgcctatcagtatatcgacgccaaccgcgaacgcaccatgaaggtggtcgtcgacattcaggactga

SEQ ID NO: 2248 - DNA, 1032 bp, Unknown
  Unknown gut bacteria
aacctgaagaagatggacgcgctgaaccgtacctacgggatccgggtgcgtccgcacatcaagccgcataagagcgtttattttgcgctggagcagctgtcctgcggtgcgcgcggcatcacgtgcgcaaagctcagcgaggcagagacgatggcggactatggcatcgatgatatttttatcgcctatcccctgatcggcgaggataagatggagcggctgggccgcctgatgcagcgcattcgggtcagcaccgaggtcaacagcatctatggtgcaaagcagctgtccgccctcggcgagcggatcggcaagaaggtccccgttcttatcgagatagacggtggactgcaccgcggtggtgtcccgccctacgagggagccgtcgcctttgcggactccatccgcgatctgcccggtctcgaaatctgcggcctgatgtattacggcggcttgatctatgccgagacaacacgcgagggctacgaggcccagacgaagagggagcatgatgagcttgtcggcacggcggagctgctgcgcgccaaaggctaccgcatggacgtgctcagcggcggcaactcctattccgcgcgctgctgcaaatacctcgagggcatcaccgaggtccgctgcggcaactatatcttcaacgacgtcgccacgctggcgaccggctttgccgtcgagcaggagtgcgcgctgcgcgccgtcagcaccgttgtctgcaagatggacgaccatcatgccatcatcgacgccggcagcaaaacgctcaccaccgacctctgcggccaccgccccggctacggctgggtcgtcggccatcccgagatccgcatcaccaagctcaatgaggagcacggcttcgtcgagagcgacgaaccgctgccctttgagatcggcgacaagatcgccatcatcccgaatcacgcctgcgtcctgccgaatctggtcgataagatctacggcatccgcaatggccgcatcgagcgcatgatccccatcgaagcgcgcggacggtacctgtga

SEQ ID NO: 2249 - DNA, 423 bp, Unknown
  Unknown gut bacteria
atgaagcaccatattcttgacaagaccttctgggtctatacggccatcgccgtggcctgctggtgcgtggggacggggctgatgttcctgctctacaactgcctgcatgtgggctactggatcgcgtcggcctgcaactatctcgtcggcgggacgatgtcgtattttctgaaccggaaatacacgttccacagccatgacaaccggctgcgcctgctcgcgaagtatgtgctgcacatggtggtctgctactttgtgtcgtactcgctggcgccggtcgtgacgaagttcgtgctcgaccattggacgctgcacgcgaagggcaacgtgtccctcgcggtcggctcggtgacgttcacgatcctgaactatttcggccagcgctacgtcgtttttcgctcgttccatcagaaaaaagcctga

SEQ ID NO: 2250 - DNA, 555 bp, Unknown
  Unknown gut bacteria
aacaagaacttctatcagcgcaacgaggtctcggcctccttcgtcgtgaagaagcagtttgccgacaacgccgccgaagcccttgcggttgtccatgcgaaggacgattccacgctggataccctgcatgaagacctgcgtcaccaaattctcgattgcagagacgtcaataaggtcgattcctcgaccgacagcatggacatgttcaaccgcatgccgcgttggctcggcaaattcatcgtctggatcttgactcggctcgatgtccacggcatcgtccccgccagcctcatcgagaccgacccgtactattgctcggtcgtcctctcgaatctcggctcgatcaagctgagatccggctatcaccatctgacgaactggggcacctgctccatcttctgcatcatcggtgaaaagtcgaagcgccccgtcttccacgaggacggcacggtcgaaatgcgcgaaatgctcgatctcggccttaccatcgacgagcgcctggctgatggctattactattccaagaccatccgcctgctgaaaaagctcctggaa

SEQ ID NO: 2251 - DNA, 1596 bp, Unknown
  Unknown gut bacteria
atgaaacgatatctatttctgattccggccgtcgtggcggcgctgctgaccggatgttacagcgacgacacgaacaccgactacaagacgctcgacctgccggtgatcgacaacccggaaaacgacctggcgctgttcgtccccaaccgggcctacaagatcaaactcgccgaccgcttgcagatcacgcccaacgtcgtctacaagaacatgaacgacctctcgtaccgctgggtcatcgacggcagggaggtagccacgacgaaggacctcgactgggagtgcgacatggaagccaaccgggtctactgctatttcgaaattcaccgcaactccgcgggaaactccacgatcttccctttcagcatcgaactcgatcagccttacgtgacgggttacaacctgttggtcgaaaaggacggggcgctgcgctacgactttatcagctataccgtggcggcgctttacacgttcgactactacgagaacggcgccggcatccagattcctttcacgggcgataatccccgcttgcaggagtactggtcgtgcgaaaagtcatccgtcatcggcaaagagatgttcctcgacgacgatccggagaactgcgcctcgttcagcggcgaaaccctgctgcacgaaatgacgctgaagcaagagttcctcaatgaggagtttccggagaacttccgggtgaaggacttcatgcacggcggcttcatcagctacgtgatggccgacgacgggcgtgtcttccagcgcaagggctcgcgcatctactatacgggacatttcctcgacctgccggtgcgttacgacggcaagcagatcaacggggtgaaattcatcacggcgcgctacgccgaaggctacggtctgatctacgaccagactgaaaacggcggccgtttcctggtggccaatctcgattacagcacctccgaggcggattccggcgaaagggcgggaaatatcacggagttccccgacgacagcggcatgagcggcatcaccgactacgagttcatcgacggctggttcatcaaggacgccaacgtcatggcctatccccagcagtcgggcgtcatgatgctgttccgcaagaagtccgacggcaaatattacacgcgcgaggtgaagatctcctacacgccgagaacctcggccgtagagatgtcggaggtctacgaggaggtttaccgcgaactccccgagttcggtcccgacagcaagacgtgcgtcatccgcatcgacggcggcagctactacaagtcgggttacatgttctacaccgcggcgtcgaatccgcgcaaggtgctggtcaaggagcgcacggcgacgggagctcccacggagttccacacgttcgatcaggatgtcgtggccattgtcgaaggtacgatgaaaagcaacaactgctatatgctcttcgcattggccgacggcacggtgatgatgtacaccacttcgaaccggaacgtgggttcgggcgtgaacttcctcaccttcgaggaggagcgcgtcatcgagaaataccggatcgacggcaaaatccgctgggccggattcaaatacggcaacatctcgaacttctga

SEQ ID NO: 2252 - DNA, 1725 bp, Unknown
  Unknown gut bacteria
gccgcagcctccatcgccgtctcgtgcaccaagtcgtcggccccggaagaggagaatccggtgcccccggccccggtcctccggtctttcgatctcggaagggtcgattcgctcaacaaggtgtgcaattatgcgtcgagcgtcgtttccggcgaagacgggtctatgaaaatactcctcctgagagacgatgaatccatagacataaccccggaggatctgaaatccggcctgaaagtcgaggacaagggacgctacttcctgttttccaggccgggggggggtgaacccgacgcggttctcggcagcgacatcccgatgccctacaatccgcccctgcgcaggatggaagagggccggacgctcaatattctctgtatcggcaacagcctcacggccgacgccgtggaacatcttccgagaatcctgaaagacatgggaatcggcaatgtcaatatcgacgtaatctatcacggaggatggtcgctcctgaaccactggaacaacttccgggacacgaaatgctcccgctacatctacgaggcgggcaaggacgactggacggagttcgatccgaatctgctggatgactgcgcggcggacgttctcgcgctgcgggaatacgacatcgtgactttgcaggacgacacgaggaccaattgcagcggatggtccgaggagggccgggcggcttttctcgaactggtcgatcacatacagcatgcgcagccgacgcaccgtccgagtatcgtctacttcgcccctcattgtcccgccgccaagctctacggcacccataacaccattctgtgggagctcttcgacggagaccaggacaaatgctacgcagcgtttctcgcccaaatgcgggaagcgacctcccggacccccgtcgatctgttcttctcgaatgcgaccgccgtgcagaatctccgcacctcggaactcaacgagaaccacccgctcgacctcagccgcgacgggacccattccgactatggagtcacgcgcttctgcgaatcggccctgttcttccagtccattctgaaacccgctctcggggcggacatatcggagagccgctatcttttcggcaaaagcgacgaaaccccgggcaaatgctcgaccccggtcgatgaccggacccggccgatagcggtcgaagcggccctgaacgcccttaaaacgcacttcgagatcacgagaatgtccgaagagaagccccccgtcgagggttcggtgaattacgtcctgaaactttgcgattatccgatcacgctggaaaatgcgcccgaagacatctgcacgataaaaaaggccggcgctcccctcgggctcgactgggaaatttcgggagaggcccatgacaagttcgtgatcaccaacggcgcggccaacggacgctataagatcggggccaacgccgactacgtggacccgttcatcctgaaaacgaacggactcgcgggaaagaaaatctcgaaagtctccgtctggatgtcgagcggagtgaaggacaagctctcgcgcgtgtccgtcagcgtaggggaccgggagtatcttccccttacggaggcggccgtcagcgtgacggccgtgaagaacacgggcttcgagtattcggccgactgcggcgcgtccacggaaggcgaggtcaagataacgatccgttcgaccgccgcattctacatctacaaaatctatatcgactacgagcaggagtag

SEQ ID NO: 2253 - DNA, 975 bp, Unknown
  Unknown gut bacteria
atgaaactgcgacttctgctgcttctgttgtctgcattgaccccccccctgctcgttcatgcacagagtagcgcttccaaacccagccggacgataaccggcaatgtcaaaaacgagaaaggcgaattcattgtcggtgcctcggtctatgtgaaatcgacgccccgcatcggcaccgcgaccgacgccaagggcgaattccgcctgcaaggcattccgtcgggcaagcagaccattgttttcaccttcataggcatggtccccttcgaggtggagtatgccaaccagcgcgatctggaagtcgtgctcaaagaggacgccacgcaggtcaacgaagtggtggtgacgggtatttacagccgcgacaagaacagcttcgccggttcggcgacgacctacacgggcaaggagttgcgggccatcggcacgaagaacgtctttcagagtctcaaaacgctcgaaccggccttgacgctcgtcgagaaccgcgctttcggttccgaccccaaccggctgcccgatctggagattcgcggcaagaccagtctggtgggcgacctcaccaccgagtacgacaatacggccaatcagccgctcttcatcctcgacggcatcgaggtggagatcgcccagattcagaacctgagcatggaccgtatcgccagcgtcacggtgctcaaagatgccgcttcggcggccatctatggttcgaaggcttccaacggggtgatcgtcgtcgagacggtcaagcccgagccggggcagctgcgggtctcctattcggccgacctgcggttcgagttccccgacctctccgactacaacctgatgaatgccgaagagaagctccgctacgaggtgctggccggacgctatgtcggcgaggatcaggatcagttggatgcgctctacaattcgcggctggccgaggtgatgcgcggcgtggacacctattggttgtcggttcccctgcgt

SEQ ID NO: 2254 - DNA, 1611 bp, Unknown
  Unknown gut bacteria
atgaaactgcggaagcccatattcctgctccgaagcctgctgttgtccggcatggccgtgctgaccgcccgcggccggaacgacaccgccacgctcgaaggagaattggactatatgatcaggaacaagcggcttttcgacgaaaagaaggaggagcgcatcgacggattccggcggatgctgtgtatgaccagactgaccccggaacaggagtacgcgatcaacgacagtctcagcgaagttttctacaaataccggctcgactccgccatccgctacggagaacgcaatctggaactcgcccgccggctcggcgaccgggagcgctgcgcctccgccgcaatccggctcgcgcgattctactcctcccgcggcgcctgcatcgaggcccggcagctgctcgactcgatccgcagggagctgcctcccggctttctcgaactctattaccggacctacatcttcttctacgactgctacggggtcttctccggctccagccggccgacgaacaaccgggcggtttaccgggattcgctccggcggcatctcggaatcccggccaatacgtccgaaaccagggagcaggccgaacaacggctgctgaaccaactcacgcagataccgcccggaacccccgattatgccatgatcgccaactccctgggcagccactaccgggcgaacggcgacgactggctggcgaaaaaatattacaccctctcggcgatcgccgacattcagaacgccacgaaggagaacgacgcgatactctccctggcgaaagtctacttcgatcacaaggattattcgcgggcctacaaatacacccagtcggccctcgaagacgccctttgcagcaacatgcagttccggatcgtgcggatgacggaactcgcctcgatcatcatcgcctcgcaccaggacaaagaggccaaaaccaaggtcaaactgcaacactatctgatcctgatcagcgtcctttcggcggtgctcatcctgctgttcgtattcgtctacaagcaggtgaggaagctctcgcgggtgcggaaagagctctcggggaccaatgccgaactcgcccggctcaacatcgagctgaacgagatcaacgaacagctctccgacgccaacgccgtcaaggtgcagtacatcgcccgcttcttcgacctctgctcgatgtacatcgacaagatggacaactaccgcaagtcgctgaaaaaactggcgcaggagcggcagcccgacgaactctaccgccggctgaaatcgacctccatgctcgaaaacgagcaggaggagcttttccggaatttcgacgaaatcttcctgaacctctacccgaccttcatcgaggagttcaacgaactgctggtcgagagcgagcggatcacgccgaaatccggggatctgctgaacaaggagctgcgcatctacgccctgatccggctgggcatcaccgacagcgtaaggatcgcatcgtttctgcgctgttcgctgagcacggtctataattaccggacccggatgagaaaccgggccgccgcctcgcgggaggacttcgaaaaaaaggtcatgaaaatcggaggcatacacagaaacgacgcgtga

SEQ ID NO: 2255 - DNA, 2862 bp, Unknown
  Unknown gut bacteria
atgatcgttttgagtgcgggtgcattggccctggcgcaaaataaacggatctccggtacggtcaagggtgtggacggcaagccgatcgccggcgctaccgtgctcgtagaggggacctcgatcggaacaaccaccaatgccgaaggccgcttttccgttcaggctcccgccgacgggacgctggtcgtttcgttcatcggctatgcctcgaagagtgtgaacatcgcggggaaaacgcgcctcgacatcgcgctgaaggaagatacgcatgccatcgacgacgtgatcgtcgtcgcttacggtacggccaagaaggagtcgttcacgggttccgtcgccgtcgtcaagggcgaggagctggaacaccgcaaggtttccaacgtcaccaaggcgctggacggtctggctccgggcgtgcaggtcacttccggctccggacagcccggatcgggcacgacggtcgccatccgcggcttcggctcgatcaacgcttcatcgacgccgctctacgtcgtggacggcattccctacgacggagccatctcggccatcaaccccgacgacatcgccagcatcagcatcctgaaagacgcttcggcgtcggtgctctacggtgcccgcggcgccaacggcgtcgtgctcatcaacacgaagaaaggcaatcgcaacgagacgaacgtggaactgaaaatcaacgtgggcgtctcttcgcgggccattccccgctacgaaacggtcggggccagggacttcatggagatcatgtattcggccttctacaacgactacggcagcaatgccgtcgcgcagatggcatcgggctcgaaacgcattttcggcagcaatgagatgtacaatccctacgacgttcccctggcgcagctcttcaccgccgacggcaaggtgcgcgacgatgcgaaactgctgtgggacgaggactggctcgatgaagtgaccgacaacgccgcgctccggcaggaatacggcgccagcgtttcgggcggcaacgagaagacccagtatatgttctcgctgggttacctgaacgaggacggcgtgcttaaaacgaccaacttcgaacgctattcgggtcgtctgaacgtcgaaacgcaggcgaagccctggttcgcggcgggcatgggcgcgaacttcgcccgcaattcgaccaactcctcccagacctctgcgagcgctacctccaacgtgttcttttcggcgcagatgatggccccgatctatccggtctaccagcgcgatcccgagacgggcgactatctgcgcgacgcgaacggccggaagcagttcgactacggatcttcgcgtccttcgggccagcagaccaacttcaacagcatcgccacgctctacgacgacaaatatgcgcagacctcctattcgctttcggctcgcgcgcatatggatttcatgggcatcggcgaccactggagcgaggggctgaaattccagctcaacttcggcaccgactactacaactcgcagtccatgacctattataaccccttcttcgggaacgccgagtcggtcggcggacgtatccagaaaacgaacaccacgtcgctcggctatacgttcaaccagctgctctcctataaccgcacgttcgaccggcacaatatcgacctgcttctcggacacgagtactacgcctatacgacctcggacctctccggccacaagaccgggcttcccggcggcggcatctacgaactggatgcggcggccgtcatcgtcggcacgggcagctcgacggacgaagaccgcatcgaatcggtcttctcgcgcatcggttacagctacgacgacaagtactacctctccggaagctggcgcaccgacggttcgtcgcgcttcgcccgcagcacccgctggggcaacttctggtccgtgggagcttcgtggcgcatgtcgcaggaggcgttcatgcgcgacatctcgtggctgaacaacctgacgctgaaattctcctacggcgtgcagggcaacaacagcgtgggttcctactatgcctatcaggcgctgtatgacaccggctctccgaatgccacgcttcccggtgcgaccatcaacgacgtggccaacgaggacctgacctgggagtcgaaccacaatctcaacgtcggtctcgaagcccgcctgctggaccgtatcgacctgagcttcgagttctacaaccggaagacgaccgacatgctgctgagctatccgctcgcctcctcgtcgggcttcgacagctactaccgcaactcgggcgagatgcgcaaccgcggtatcgaattcgccgtcacgggacggatcttcgaccgccgggatttccagtggagcgtgacgtggatgggatcgaccgtcagcaacaaggtgctcaaactgaccgaggacggcaaggacatcatcggttcgacgcagatcatccgcgaaggcgaaacgctctactcctactacgtggcccgttcggccggagtcgatccgatgaccggcgagaagatgtattgggcgacggacaaggacggcaacgactacatcaccaaatcgacgaccgtggcccaggcgaaccgcgtcatcgccggaagccgcattcccgatctctacgggtcgctctccacgtcgctgcgctggaagaacctcgatttctcgatctcgacgaactattcgatcggcggcaagaactacgacggcgtgtattacgaattcatgagctgctactacacggcacaggccaaacacaaggacatgctgcgtgcatggcggaagccgggcgacgtgacggacgttcccaaatacacgatcggcgaaacccccatcgtcacggacgacaagctggtcgatgcctcctatttctcgatc

SEQ ID NO: 2256 - DNA, 3063 bp, Unknown
  Unknown gut bacteria
atgaagatgattttacgtcaagccttggttctgctgtcggttctgttgcagtgcggtgctgcgttcgcacagccgcggtccgtcacggggcgggttgcggatgtgaacgggatgcccgtggtcggggcgacggtggtcgtgaaggaggcgcgcagcagcggggcgatcacggattccgacggacgctaccaaatccggattcccgaaggcggcaagacccttctgttttcatttgtcggttatcagacgcaggagcaggtcgtggctccggggcgtacacgtttggacgtggtcctgcaaccctcctccacggaaatcgaacaggtcgtcgtgacgggatattcgcagaccacggtcaagaaggttaccggttcggtgggaatcctgacggccgacgaattgaaactcaagccgcagacctcggtggatgccctgatgcagggcgagctggccggcgtttcggtgacgccgacgacgggacggccgggggccagtcaacggattcgtatccgcggcatcgccaacctctcgggaaatacggcgccgctgtgggtggtcgatggggtcccgatgcagaacgagggtccgagtacgaatctgagttccaacgaactcaaggccggaggcttcgacgatattttcatttacggtatcggcggggtgaacccgaacgatatcgagtcgatcgtcgtgctgaaggatgccgcggctgctgcgatctacggttcccgggcggcgaacggcgtcatcgtggtgactaccaagcggggcaaggccggcaagatgaaggtcaatttctcgtcgaatgtcacggtttcgttccggccgcagcggcagccgtcgctgatgaatacggccgagaaactggcctgggagcgggagctttgggacgaattcgcggctgagaaatatgcgcagtcgcttctggacccgtcggtgatctatcctacggtgggcatcgtggggcaggtgcgttcgggacagctggccttttcgcatctcaagggcgacccggcggcgcaggaagcctatctgaacagtctggctgcgaccgacaccgactggtacgacgtgattcttcgcaacgccgtgtcggtaaacggccatgtttcggtgagcggcggcgagaatgcctacaactactatctttcgttgggttacaccaatgaccagggcatgctcatcgaggacagcgccgaccgctacaccttcaaggcgaatctgggattcaaaccgacgcggcgcctgtcgttcgacgtgggggccgacatttcgtaccggcaggccgatacgccgaatccgagtgtcgatcccttcacctatgcctacttcgccaatccctacgagaaaccctacaacgacgacggaagctatgcgaacgaccagacgtggctttcgctgcccaactacaaccgcgatacctatgaggacctgccggaaaagggcttcaacattctccgggagatcgagggcaacaagacgaagaccgattatgtttcgacggaggtgcgtatggggctcgaatacaagctgctggagaatctgaaattcgtcggtctggcctcctacaatttcaataacaacgatacgcagaccacgcgggaggaggacacctacggggctttcaaggaccggttgagcatccaccgtacgcataacggcaatctctacggctccattctggaaaacaagagccgccgcacggggtatctgctgcgcggtcatctctcctatgtcggggagtacggcgaggggcatacgctgaatgtcgtgggtggagccgaattgcggggcaacgattcgcatacgctcttcaacaaacggttcaactacgatccgcggaccgggaatacggcccttccgccgatcgagaaaccctcggagagcacgttgcgggagatcgagcgtctgacgggcgagtatttcaccaagtcccgttatgcgtcgttctacctttcggccgactattcgttccgggaccgttatattctgagcgtcacggggcgcgccgacggcagctcctatttcggcacgcatgcgcagttcaatccgaactggagtgtgggcggagcctggattctgaccgaggagcccttcatggcatcggcccgcaaggtgctccattacgccaagctgaaagcctcttacggttttacgggaaatatcgtgacgagcgcctcgccgcagctgatgatgaactattcgttgcagacctaccgcgaatatatgaaccagaaccatttggtcggaacgatctcttcggcgcccaatccgaatctggggtgggagaaggtcaacgacgtgaaggtgggtctggacctgggattcctggacggccggctttcgctcgaaacggagtattacagccgtctgaccaaaggcgccgtggacgacaagccgctctacgtgaccacgggattcacccatcaggcggccaatttcgcccgcctgcgcaaccggggtatcgagttcacgctccggggcgggatcgttcagacccgggactggacgctggatgcttcggtcaatttcgctttcaactcgaacaaggtgctcgaatatgcgagttcggtatcgttccagcatatgaagctcaactactacgagggctatccggcccgggcgctcatcggcggcaaggtggtcgggatcgaccccctgacgggtctttacgaattcaaactgcgccccgatgcggtcatttcgagcgatgcggactacaccgacgaagccaactacctctactatctggggaaccgggaggcgccgttcaacggcggtttcagcctttcggccggataccggaatctgcgtctgtcggtcaacggcgtcttttcgttcgggtcttacgcctatgaccgcaacgagtcgccggcgacttacagccagatcgctgcgggaagcgtctccacgatggaccgggcgcagacggagtacagcgatctgtattcgaaccacctgaatgtctggaaagaccgcaccgaccgttggacggagacgaaccctacggggacgaagtacccgcggatctacgactcgttcgacgcgaagtaccatttcgac

SEQ ID NO: 2257 - DNA, 1353 bp, Unknown
  Unknown gut bacteria
atgaacataggaaacgatccgaaaaaacgactgaacatgagtatcaagccgatgctcaacattcgccccggcagccccgacggacgctatacgctcgtcattcagctcatactcgaaagacgccgcggcgtgctcttcacgccgtaccgcctgctgccggaggaattcgatctccggaaacgcaaggcggtcgccgtcaaccagcgcaagacgcacgtggcgcatatcagggatgtcaacgcctttctggagaaacagcgggaggagatcgcgcgcatcctcgccgagttcgaacgggacggaaaacccttcaccgtccacgatattacttcggcttaccgccggcgatacgacaaccgctacgtgcacacctttttccagcatcagatcgcggagctgatcaaggagggttcgcagggtacggcgaacaaatacaatgcgacgctggtggctttcgagaagttcgccggcagccgccgggtccacttcgacgacatcgacgagaacctgttgctggatttcgaacggtatctgcatcagattccgctgcaacccaacacggtatccttctacctgagcaatttccgggcgctgtataacaaagcccagaaacgcgggtatgtgacccgcagccggtcgcctttcgatgccgtgcccatccgcatcgggaagacccgcaagctggccgtcagcgaggagatgctccgcaaggtcgccgacgcccggttcccggattccgagaagctgacctgcgcccgggatctgttcatgttcagcttctactgccggggaatgtcgttcgtggatatggcctatctgcggcaggaggatattcacggagggatgatctactaccgccgccgcaagacggggcagacctatacggtcaagatcattccggaggtgcaggagatcctcgaccgctatcgggagcgctgctttccgtgggcgctgcccgtgatgctcgacttcgacggagagggccgtttgcggcctctcgtatacgagggcgcgacggcggaggaccgcaagcgcttcgaagcgcggttgtatctgcgctataagtacaacctgtcgcattatctgcgcttttaccgggatatgagcaaaaaactggaactgcccgtcaaactgtcgttcaacgtcgcccgccacagttgggccagcctcgcgcgcaagcacggcgtctccgtttccgtgatcagcgcgggactggggcacacttccgaaaagaccacgcaaatttacctcgacgaactggacaacagcaccgtggacgctgcgaacgcgatggtggcgggactgctgaaagctccggctccggatcggggaaaaagggcggagaaaaagttg

SEQ ID NO: 2258 - DNA, 774 bp, Unknown
  Unknown gut bacteria
atgaaagacttcttacccatcgtgaaactggcctgcctgacggctgcggctgcgctgatcgtctcctgcggcggcggtgccgattaccggaacgtgctgccggccgattcgttcgtgacgatgtcggtcgatgccgcatcgctcctgaagaagagcgggacgtgcgacgccgcctccaatccgctcctcgaccgcctgaaagcggagttggacaaggcggaggagctctccgccgaagagaaggagtacctgttttcgctgttggagaatccggccgaatcggggctcgatctgaaaaaggaactcttcctgttcatgtcggcggacggtgccgacatcaataatcccgaggtgggcggcggcctgctgttcccggtcggcgacaaatccaaactggacgccctgatcgcgcgcatcaacgagaagagcggcaccgagacggtgaccgaggcgggcgtttcggtggtgaagatcggcgaggagtcggaggcgtccggtgtctgcgcctataacgacatcgcctgcctgctctatttcaagaccgatccctgcggagtcgtcgaggagaaggttcggaagctgttcgcccagaagcgcgctgaaagcctgatgggcgacaaggccgtcgccgcacggctggccgcgcgcaacgacgtgaacatggtcgtgtcgtatgccaatctgtcggccatgatgaacaatccgatgctgggtgcgatgcccatgatggatgtgctgaaaggggctctggtgatgggctccgccaatttcgag

SEQ ID NO: 2259 - DNA, 711 bp, Unknown
  Unknown gut bacteria
gtgaccggcggaagctgccgtgtcggcatcgacttcagggagtaccgcctttcggagggcgatgtcgtggctgtccggccgggacaggtccaccgcgtcgcggatgccggcgacgccgaggcgctgctcctctttgcggacgctgcgctcgtcgatcccccgaataagcaggtgctcgccgaatatgcgctgtgtccggctccctgccgtaccgccggggcgcagcgggacgaactggaacggttgtttaagatgatcctccgcaggatggacagcctggagaacgacgattcgaaacgcatcgtgcggtatctgtcggatgcgctgatggggatggtgacggagatcctgcggagcgcggtcggccgattgcccggaaaccggcggcatgtggaaatcgtgctggcattcagggaactgctggcggaagacggccggatcgtccggaatccggcccactatgcggcggcgctgcatatctccccggtctatctgaacgaggtggtgaaaaacgtgaccggggagagtgtcggcaggtacatccggaacgaaatcgtgctgcgcgcgaagcgcatgctggtctatacgacgcgcaacatcggggagatagcctgcgaactgggcttcgacgactatgcctatttcacccgcctgttcacgaagcagaccggaatgaatcccaccgcctatcggaaaaaatacctcgaatag

SEQ ID NO: 2260 - DNA, 2181 bp, Unknown
  Unknown gut bacteria
atgaaaaagcatatcacacacgccgctctgctgctctgcacggtcttgaccgtcgccgcatcctgctccaaggaggcgacgggcgaaggcggcgcagcgggcacgggcgtactcgaaatgaacatttcgaccacccgcgccgaagccgacgcggaatacgacccgaaagaccatctggtcgcacgcatctacaattcgcgcaacgaactgatccgcaaatacacctccgaaaccttcgtgaagcaactggagctcatcgccggggaataccggatcgccgtcgaagccggggaggctgtccccgcctcgttcaccaaacgtttctacaaaggcgaagagaccttcaccgtcacccccggggagacgaccgaagccgacgtgaactgccgcaggcagaacaccgccgccgaagtgaaattcgacgcctcggtcaccgaggctttcggcacggacttccgcttctggatcgtcgccgacgacgctttcgacgaggaaaaagccgagcaggaggccgtcccggcgctgaaatacacctccgacgccacgggttacttcaccctgcccgaaggggtgacgactttcgtctggcatttcgaaggcacccactccgaacgcgggcagatcgtcatggagggccggcaggagaacatccaggccggaggcaagtatgtcttcacctgcctgttctcgaaggacctgccggggttcatccaatgcgtcgtcatcaaggtcaacaccaaccccgacgagcaggacgacacgatcattttcagtcccgaccccaccatcgagggcgacggcttcgacatcgcccagcctcagggctacattcccggcgacacctggacgcgaagctacaaactcgcggccatggcgcccctgaaaaccgcggaactccggttcggcgaacagacctacgacctgatgatgagcgacgctccggccgagggaatcaccgtcgtccgcgacaacgacctcagcctgacggtcaccctttccgaagcgttcctcgcaggatgtcccgcaggcagtcactccgcctcgttccacatcgccgacacgaaggacgccgaagccaccgtcgcctcggaactccgcgtgcagggaatcctgccggtcggaaaagaggattacgacctctgggccaacacggtcacgctgcgggccgtggtcgtcgatccgaacgtctcggccgtcaccttcgggctgaaaaacggggaatcgtggctggaaacggagggaacggccgacggaaacggctgttacaccgccacctaccgacccgaatggaccgaatcgacgaacgaagccgggctgaaggtctacacaccggaacccggtaaagaaggcatcaccgccggcaacgattatgaattacgaagcatgatcggcgatcgaacctattccgcatcgctgacgactcccgcaggcgacaccatttacaatgccggaatggactactggacgacttataatgtcacgggaagctcgatcacaggcggaaccgtcccgtatccgaatgagaacagcagcaccgtgttctgggtcggcggcaacaacgcccaaaccaatgccctctgcaccggagttaatgtcaatgacaacgatgacagcgacaagtgcgcacaactgaaacccaatgtgaaaatgaacatcttcgctgccggcaatctcttcaccggaacattcgattgcgggacaggattactcgacacattcggctacgcccgtttcggcgtgcaatacacgttcacggcccgtccccgggccctgcggctccgctacaaggcaaccgtaaccaatatcaccaatacgggcaacagcggtctgacaacgaacgacatcgactcggcacgcgtcttcgtctgcgtcatcgactggaccggacgccacgccgtaaaatcgggagcatcgtccgacgaatccacattttgggacccggagaccaagtctctcttcaacgaaggcccgatcctgggctattcatcgaaaaaactcgggaagtcaacggaaggttgggagacgatggaactgccgctcctctggtatgacaaggacaaggccccgaccgcaggcaactattcactggtcatctcctgtgctacgagctacaagggagactatgtgacgggaagtacatccaatctcctctgcgtggaaaacttcgaatgggtctattaa

SEQ ID NO: 2261 - DNA, 2055 bp, Unknown
  Unknown gut bacteria
ttcgtgcgccatatcctgccgtattcgcccgaggaactgtggatcggaaccgagtcgggcatcgtcgtctacaacgtccgcacccggcgttaccagcatctgaaaagctccccgtacgatccctattcgctctccgacaacgccgtgtattcgctttgcaaggaccgcgagggcgggttgtggatcggttcgttcttcgggggcatcaattacctgccccagcggaactccgatttcgaaaaatattaccacaccgacgatccgcacagccttcagggccgccgcgtgcgggaaatctgccccggcagcgacgggcggctctggatcggcacggaggatgccgggctctacacgttcgatccggcgacgggttcgttcggcttcttcgccccgagccgggagttctccaacgtccacggactgctgatggacggggacgacctctgggtgagcaccttctcgaaaggcatccgggtgatcgacacccggacgggccgcatccgcaaatacgacaacgacaacaagccgggacggctgttcagcaactatgttttcgccctctacaagaccaacggcgggcgcatctacgtgggaaccatgcacggactccagtattacaaccgcgagacggaccgtttcctttacgtcccggagatcaacggcggcaagatggtccgcgacatccgggaggattcgaacgggaatctgtgggtggggacctcctccaacggcgtctaccgttacgacgcgcgcaacgacgtttggacgcagttcctgcacgatgacgacgatcccgactcgcttccctacgacaacatcacgggcattttcgaggacagcggccgccggatatggctcaccaccgagggttcgggcttctgtcgcttcgaccccgccgggaacaccttcgtccgctacacctcctccgacggaatgcccagcgatgtcgttttccagatcatcgaggacgaccgcggctatttctggatcacgaccgaccgggggctggcgctgttcgatccccgggcgggccgtgtccggcaggtctacaccgtgaccgaccgtctgctgagcaatcagttcaactacaagtcggggtacaaatccccggacgggaccatctatttcggctgtatcgaggggctgatctccttcaaccccgagacgctcctcggccgcaagaccgactacgtgccgcccatctacatcaccgatttctcgctgctcgacgagaaagtcgccgtcgggggccgcaactctccgctgcgcaagagcatcatctgttcggattcgatccgcctgaaacacgaccagaactccctgtcgttgcagatcgccgccctgagctaccgcgagccgcagaccagccgcctgctctataagctcgaaggcttcgacgaccagtggcggcagtgcacgcccgggagcgccacgatcacctattcgaaaatcccctacggcaaatacagcttccgggtgcgtctcccggcggggtcggaccatgccggcccggaggcggagaagcgtcttttcatcgaggtttcgccgccgttctacctctctgcggcggcctatgtcgtctacgggctgcttgccctgggggcgctcgtgctgatccggatttactatacgcgccgcaacgtccgccgccagcagcagcacatccaggctttcgagcgcgaaaaggaacgcgagctgtacaatgccaagatcagcttcttcaccaacatcgcccacgagatccgcacgccgctgacgctcatcaaagggccgttggagaacatcctcggccgccagatgacggaccggagcatggccgaggacctgatcgtcatggaccgcaacaccaaccgtctgctggacctcacgaatcagctgctggatttccagaagatcgagaaagagcgtctgtcgctcaacctgacgcggcagaacgtgacggatatcgtcgaagagacgttctaccgtttcagctcctcggccaagcagcagcacaagactttcgaactggacccgggcgagggggcgattcatgcgcaggtcgatcgggaggct

SEQ ID NO: 2262 - DNA, 1362 bp, Unknown
  Unknown gut bacteria
aagttgcagaacatcgagcgcggcatcgagaccgactggctcgcgctgccgctgcgcacgtcgttcggccacaagcactcgctcggcatcgccggcgcctccgacgccttccgctacggactcgacctgatgtacgacgaccaggagggcgtgatgaaaggccagaaccgcaagaagatgtcggcggcgctcaacctgcaataccaatacaagggcctcacgttccgcaaccagatgaccaccacgctggtcaattcgcaggagtcgccctacggcaccttttcggactacgtgcgcatgaacccctacgacacctatctcgacgaaaacggcaacatcggcatgaacatggcgacctggcacagcggctcgccctaccgcaacccgatgtacgacgccacgctgggcagtttcgacaagggcaaacgccacgaattctacgaccagttcgatgtccgctactacctcaacaagaagatcaatttcaaagccaacgtcgccctgggatatatcgtcagcgactcggacaagttcaccgatcccgccgcagccaagttccagagcaccgagaaaaaaggccagctgacgacctcccggcaaaaacaatcgacctacgacatctcgctgaacggttattacaacgaccagatcggccgtcacaacatcaacttcgtcgtgggtctgaacatccgcgaggagaagaccgactacgagggattcacttacagcggattccccgaaggcggattctcggccccgggttacgccaaggacatcgacacgaagagctacctcgaagccaagaaccggttgttcggcgccctcgccgtgctcaactactcgtacaacgacgtgatcttcgccgacctttcgggtcgtatcgacggcagctcgcagttcggctccaacaaacgcttcgcccccttcttctcgaccggcgccggcgtcaacgtccacaacctgaaattcttcaaggagaacacgccgtggctcacgcagttcaagctgcgcggaacctacggcatgacgggtaaggtgtcgttcccctcctacgccgcacagaacaagtacgagatgttcaccgactggcagtatccgacgggcgacggcgtgcagatcatgtatctgggcaaccccaatctgaaatgggagcggacgctccagaccgatctgggcttcgaattcgagatcctcaaggggctgttctacgccaaatacaactactacatcaaggacacccacgacaacatcgccgacatgttcatcccgacctcgtcgggcttcacctcctacaaggagaacatcggccgcatggagaaccgcggacacgagatcaagctccagagccgcgtcgtcaacacc

SEQ ID NO: 2263 - DNA, 2547 bp, Unknown
  Unknown gut bacteria
ttgcttgtggtcttgtcgttatgcggctcgcagcaggcgttcggactttgtggaaaacgcagccgcaaggcgcccgccgaacagcgtgacaccacgaaaagttcggcatacgacaaattcttcaaggaggaacaccgcatagcccggggccttttcacgctgcatgagatgaaaggacgggtctatttcgagattccgctccggctgatggaccggagcatgctgctcggaacgaccatctcggctaccagcgacaacggtcacggaatcgtgggctccaagccgaaagatccgcttcatttcgcattcacgcgtgcgggagaccggatcgccatgcggctgatttcggagcggactgtctccccccccctcccggatcatgctgaaatagggcgggcgctcgcaacgagcaatatcggcgctatttaccggttgttcaagatcgagacctttacgcccgacagctcggcggtggtcgtggacgccacgaatctgtttgtcagcgatgacgagcggctgtcgcctttcgacaaatacagccagcacacgctttcgggacgcctcaaacgcaaggagtcgttcgaaaaggagaagtcctacgtgaccggaatcaagtccttttcggataacgtttcggtcagcagcagtctgaattaccgggtgacgatctcggagcgcgggctgcgggatgtgccggttacgatcgctgccacacgttccatcctgctgctcgacagccttcccgtcagcccccggatcaccgacagccgcatcgccgtttttccgacgggcaagatgctctattctcccacgacccagggggcccgtccgatatggtatgccaaccgctggcggctggagccctcggacatcgaagcctaccggcgcggggaattggtggacccggtcaagccgatcgtcttttacatcgaccgtaattttccccgcacgtggcttccgtacgtcatcgaaggggtgaatcagtggagcgaacttttcgagcagatcggtttccgcaatgccgtccaggcgcggctttttcccgaggacgaccccgaattcgaccccgacaacctcaaatattcgtgtgtgcggtatgccccggtgacgattcagaacgctatgggcccctcgtggaccgatccgcgcagcggcgagatcgtcagcgcctcggtctatctttatcacgatgtgatcgagctgatcaacaactggcttttcatacagacctcgccggccgatccgcgcgtgcggcagaagcagattcctcaggagatcatcggcgacgccctgcggtatgtgctttcgcacgagatcgggcattgcctgggcttcatgcacaacatgggcgcatcgtccgtgatccccgtggattcgctgcggagcccctctttcacccgcgagacgggaacgaccccgtcgatcatggattacgcccgtttcaactatgtcgcccagccgggcgatttcgagcgcggcgtgcggatgacgcctccgcggttcggagtttacgaccggtttctggtgaaatggaactatacgccgcttttcgccgggagccccgaggcggagtatgcgatcacctcgcaatggctgcgcgaggcgtcggccgatccggccctgcgctacggcaagcagcagttctccgagccgctcgacccccgatccctctccgaggatcttggcgacgatcacgtcagggcttccgaatacggcatctccaatctgaaatacgtgctttcgcacctcaatgcctggaccgaatccgacgaccgggattacagctaccgcaagaccatctacaacggaatcgtcaaccagtatttcacctatctgaaccatgtctatgcggacgtgggcggagtgtatctgtacgagaaacacgtcggggactcggtcgaacattaccggagcgttccccgcgagcgtcaggtccgggcgctggaattcctgttgggacagctcgacgacatggagtggctggacgaccggagtgtgacgggcaatctggggctggtggcctcggccgcggacgccgtgtgcgaggctgtgatgaaagccgtcgtggcgtcgccctcgaaagtggggctttcggcggcgctggccgagaacgacgccttcacgcccgaagcctgcatgtcgttgatttacgaccggatctgggctccgacccttcgccggaaggcgttgaatctctcgcagatcaagcggcagcgtcttttcctggagacgctcggcaaggtggccgcattgcgtgaagagggaaattccaagagccttgcggccatgcggcggatggaggttccggaggcgttccgcacggaccggtccctgctgccgaacgcttcggcaggttgtccgggacctgtggcggggtatgacgatcccatgccgctgttttacgaagagcggccgatggagggactcgcctatgactgcgtgctgaagatccggcgtttgctggagggacagcggaaccatcccgatccgcagacccggctgcactaccgttcgctgttgcatacgatcgaatcctatctgaaatga

SEQ ID NO: 2264 - DNA, 1080 bp, Unknown
  Unknown gut bacteria
aacaaggacggaaaacggctcttccccgaccggaacgactcgaagctgcaaacggcggtggaccgtctgcgcgacttcctcgactacgccgagcagggcagccgctacgaactgctcaacacgggcaacccggacgacgacctctacaaactgttccaggaatacaacagggagatcatctgggccacctcgaccaattcgtggggcaagctgggcgaacagaaattcgacaccttcgcaaccccgcgctcgcagcctcagggtcagggcggattccacgtcctgcaagagctggtcgatgacttctacatgaaggacggcaagccgatcaaggccacctcgttcctccccaagtcggagctctaccccgccaacgaagccgagatggggacctacaacggcgttcaggtgtcgaagatgtacatcgaccgcgaaccccgtttctacaacaccgtcacgttctcgggcatgaagtggcacatgagcaatcaggagatccagttctaccgcggcggccgggacgacaactcggtggccgacggcgccccgctcacgggctacctgctctacaagcgcatgaaccgcacggtctacggaggcaacatctccggcgccgtaacgtcgaaataccgtccggtgatcatcttccgcctggcggagttctacctgctctacgccgagatgctcaacgaggtggacccgggcaacgcggacgtactgaaatacgtcaatttggtgcgccggcgcgccgggctggacgacctggaggcgctgaatcccgccatcgagggcaaccagaccttgcagcgcgaggcgatccgccgcgaaagccgcatcgaactggccaccgaggggcagcgctacttcgacgtgcgccgctggatgatcgccgacaaagcgcccggcgaaggcggtcagggaggcgatttccacggcatgaacgtcgatcaggcgcagcccgcgttctacacccgcacgaagttgcagacccgctccttcaagaacaaaaactacctctatcccattccgctggacgagatcaagcgcagcgacgtgctggtgcagaatcccggttggtag

SEQ ID NO: 2265 - DNA, 783 bp, Unknown
  Unknown gut bacteria
atggaagaaaaacaaatgacgttctgggcgcacctggaagacctccgctggagcctgatccgcgtggtggccgtgctgctcgtattcgtgatagtttgtttttgcgccatgccctatctgttcgaccacttcgtgctggcaccgaccacctcggactttccgctctaccggtggctgtcgcagatcagcggctcgaacaacccgctgctcccggatttcagcaacgacaactactccgtggagatcatcaacatcaacgtcgcttcgcagttcctgacccacatcagcacgtcgttctggttcgcgctggtgctgatgttcccctacctgatcttcgagatctggcggttcgtgcagcccgcgctgttccgcgaagagcgccggagcgtcggactggcgttcatcggaggcacgttcatgttcttcctcgggtgcgccgtgggctacatgctcgtgttcccgttcacgttccgcttcctcacggagtaccagctgagcacgtcgatcgtcaaccagatctcgctgacctcctacatggggaatttcctgatgttgatattcgtcatggggatcgtcttcgaactgccgctgctggcgtggctgctctcgaaaatggggctggtgaccaagtccttcttccggcaataccgcaagcacgccgtggtcatcctgctggtgctgtcggcgctcatccccccctcgggcgacccgttcacgctgatggtcgtcttcctgccgatctacctgctctacgagctcggcatcaaattttcgagggactga

SEQ ID NO: 2266 - DNA, 651 bp, Unknown
  Unknown gut bacteria
atgcctgaccctgctggttgcgtgcaacgacaacgagggggggggaattccacgcccgtaacctttgacgacccaacgttcgcaacctacagcctcgcgcatttcgatgccaacggcgacggcatcctaaccgaaagcgaagcccaaaaagtcaaaaagctgacactcgacgccaataccgatgcctcgctcgccggaatcgaatcgctcgccggaatcgagtatttcaccgagttggaagcgcttgcctgcaccaaatgcaatttcgcgtcggtggacctgagccgcaaccgggaactgaaatcgttggcactgatgtacggaaaactcacggcgttagacctcggagccctttccgaactggaaaccctgaactgcaactccaacacgctgacggcactcgacctaacgaaaaatccgaaactcaaatacctctacgtgcaggccaacaagctcaccgcgctcgatgtcagccgcaatccggagctggaacatctctatgtaagcattatgagcttcatgtcgaatcagatcgaaacgctcgacatcacccaatgcccgaaaatcacacagttgtatgccgttgacatgacctcgctcaaacagctccgtatgttgcgagcccacaaggaagcgaatatcctgatgagc

SEQ ID NO: 2267 - DNA, 981 bp, Unknown
  Unknown gut bacteria
atgaagaaaatagcattcatcatcattcgctacggagtcgaagtcaacggcggcgcagaagtccactgccgcatgctggctgaacgattgcgaccctattacgacgtggaagtgcttaccacaacgacccgaatcttccgggaccccgccagcgactaccccgaaggggtcagcaccgtcaacggcgtcacggtccgccggttcaaacccgcacccatcgacggagagcaccacgggctctaccgcaagaagtgcaagacggcccgccgcatccgcctgcaactggccaaaatggggctgctgggcgtgatctcctcgctgcatcccgaatggaccatgagcctcgaagccgaaaaacgctactacgagtcgcaggaggaccatacgcctcagatgttggagttcatcgaacggcacaaggatgaatatgcggctttccttttcatgaatttctatttcagccagccggtgctgggctcgacgatcgcccccgaaaagacgatcctcattcccctggttcaccccgacaaaccgctctattacagcatcaacgccccgatgttcacccgcgtaaggcacatcgccttcaacaccgcggccgagcggcagctctgccgccgggcgttcggcgcctcgctggccccgaacagcctggtagggtgcggcatcgaagaggctccggaagcggattgggggggggtcaaggccaaatacggactgcccgaccaatatgtgctctatctcgggcgcatcacgccgtcgaagacgacccgggtgatccccgacttcctgcgctacaagaaggaacacggcggcgaaatcaaactggtgatggtgggcggcacggaactcgacatcgagcgttccgactctcccgacatcatcttcacgggatacgtttccgacgaagaaaagagcgccatcatccgtcacgccacggtgatggtcaatccgtcgcgcatggagagcctctcgctgctg

SEQ ID NO: 2268 - DNA, 1443 bp, Unknown
  Unknown gut bacteria
gcaacgacgcaggcgacgctggcgccgacatcggacgacctgcatgaaggcacgttcacggcccgcgtgccgcagaatacgcgcctgatccatttcctgggcaaccagaacatgctggggtttcaggaacgcgatttctacaacaagtcggaggcgcaggtgatggccgcgctcgaaggctcttcgggcatgatgatctattgggcccgtttcgcctgtgccgaggacgatccgcgctccgtcgccgagcagctgaaagcgcagggcgggatagagctcgtccgcaaccatgcgctgatctcggtggacaaccccgcgggcaacggcagtctggacgtgaccgggttcgtcgtctgcaacaccagcgcgttcggcaccgtggcgccctatcaccccgagcagggattcgtatggccggggacggagcctttcgtgacgctgccgaaaaatacgtcggtgatgagcgacatcctcgacgtgacgaccgacatgcggcaatatgtcttcgagtgcgagaatacggccgacaaacccgtcagcgtgatcctgcgcggacaccgccccggtgaaaccgaggccgacgacctctattaccgcgtgatgctgatcgatgcgcagggcgaacagctgctcatccgccgcaaccaccattacattctccatatcgagggcgaactttcctacgggcagcgttcgttcggcgaagcgctcgatgccgccgcgacgaacaacgtctggatctcgatccgggacaatatcgacgaggtttcggacggcacctttaccctgaaagtcgatcggacgagctatgtgctggaccagagcaacgaggggcggcagtattcgcttcgctacacgctccggaggaacgacggatcggcggtttcggaggccgacaaaccgtcggtgacgtggctcgacggcaacaacgtggcggggcagaatgtcggcaattcgttcgtcgtcggaagcgacggcgtggggaacggcgaactcaccgtggtgctgcgcgaaatgggcggcagcgaaaaactcgaagggacgctgctggtcaaaaaggggcttttgcagcgcaagatcaagatcatcctcatcaaaacgcagtcgttccggcccgcatgggtggcgtcgcaggtgttcggcacgccctctgccggagagagcggaggcacgtacggcgaacatgtgacgttgatgttcaccgttccggagacatgtccggcggagctgtttccgctgcgggtgctgatcggcgtcgaggatctcgatgtccgcgcggcggccggcatgtcgctgccggtgatccgccgcggcgaggatggcttcggagagaatatcctcgacgaaaagggggagccgatcgaatacaagttcgtctatacggccgtacagccgggcgtgcagcgggtgtatttccgcacgatcctgccgcagagcggttcc

SEQ ID NO: 2269 - DNA, 1587 bp, Unknown
  Unknown gut bacteria
ttgctctccgccttatcggcgtttccggttttcggtaacgacgaagccggattgcaggagttgttccgccggctcgaccgggcgatcgcccatagcggggaggatgccgcccggcgcgaagcccgtatcgactcgctcaaaaacgaactgggccgcgaagaacttccgctgcgcacgtgtttcgacctgaccgaacagctcgccgacatttacagttcctatcagagcgactcctcgctgctctacttccggcgggggcttgaactggccgaacggatcggcgataacgatctgaccatgcgcgcccgttcctcgatcgcgctgtgttacagtctgggaggccgtttttacgaggccgaggagatactgaacgccatttccgatacggtgagcgtcagccgccgggccttgcagtcgtattatgtggcccagcaccgcaagaaccgggaactctgctacctgaccgagcccggggcgcggcgcgatgtcttccgcctgcgcgaacattattacgcacggcgtgcggcggagatcggcgaggacaccttcacgcggctttactacggttatatggatgcgattcttcgggaagactggcccgaggcgacggctctgtgcgacagcctgctgatctccctgccgtccgattcgcacgagtacgcgaaggcggccaaccacaaggcgcagctcgaacgaagggcgggccgtcccgatcgtgaattggcgtggttcgtgtgttcggccctggccgatattcagtcggcggtgcgcgatcacggctcgttgtgcgccgtttccgaaaaacttctcgatcggggggatgtcgagcgggccatgaactatatccgtgtggcgatcaacgatacgcgctttttcaactctccgagccgttcgtggcgtgacatggccatccttccgcagatcgagtcggcgtacagcgagcgcaacgcccggttgcacacgatgtatatcgtgctgatatgcgtcgtgctgctgttcttcgtatccgccgctgccgcggggctgtacgtgctgtcccagaaccggcggcttttcgccgtgcagcagactctccgcgagtcgaacgacaagctgaacgaactggcccggagcctgcgcgaaacgaacggccggctgagctgccagaacatccgcatcgccgatgccaaccggatcaaggaggtctatatcggcggattcctgcaaaccatctcggaatacatcaacaagctctcggccacctatcagcatgtcaataaaatgttgcgcgacgaccggatcgcggagcttcgccgcgagtatgcccgcagcaatatccgcaacgacgaactgaaggagttctacgctcttttcgacaagacttttctggggcttttcccctccttcatcgacgagatgaacgctttgctggacgccgaagcctgcacggaggggcgccgcgacggggagctcaccaccgttctgcgtatctatgcgctgatccgtctgggcattgccgacacggcgaccatcgccgccttgctgcattgttcgatccgcacggtctataattaccgctccttcgtccagcgccacgtgcgtccggag

SEQ ID NO: 2270 - DNA, 900 bp, Unknown
  Unknown gut bacteria
aacaacgtcacctcgcgggtcgtcaccctcacgctcgacgaagccaccgacatccgcaacgtgaagatcgacgccgtgacctacgacgccgtcgtacacagcatcgagctgaacaaggcggaacttctggatcaggtgcgcagttcgcaggagctgaccggcacgttcaacctgctctcgccgatctacaccacgctgtcgctctatcaggactacgactggacgatccgcgccgtgcagaccatcgagcggcgcttcagcgtgacgggacagatcggcgccacggagatcgacaccgaaaaccgcatcgtcagggtctatgtccccgacgacaccgatctggggcatatcgaaatcgaggagctcaaactcggcccggcggagatcaccacctattcgccctcgctcgaagagctttcgggcagcagtttcgaatcggtgcgcttcgtggacgttacctgccacggcgtcaccgagcggtggatgctttacgtggagacgaccaacgtgaaagtggcgcttcgggaagccgacctgtggcagaatacgggtacggtcacggcgctcatctccgccgacgagtacgcctcgggcgccgcgctggaataccgcatcaagggcgacacggagtggcagccgatgcaggagagcggctacgacgccggcatcctgacggcgacgatcgcccccgaatggaaaacggaaaccaatccgaacggactgaccgtttacaaactggtgccgaaaaagggattgttcgcaggccacacctacgaattccggctgctggtcggcggcagcgagcagggcgcaccgttggagtacacggcccccgcgggcaacaccatccccaacggcgacatggaagacgcctcgatgagctgctggacgcagaacaac

SEQ ID NO: 2271 - DNA, 1332 bp, Unknown
  Unknown gut bacteria
atcaccgagtgccttcgccgaatcggtttcgaaagcggacgcatgaaaaccgggaccccggcgcgtctcgacgcccggaccatcgacttcgaacggctcgaaccccagtacgacgacgaaaatccggctaaattctcgttttcacctgatacacagccagttaaagaccaacttccttgttttttggtctatacctccgccgaggttcacgacatcctgcgcagcggtttcgaccagtcgcccctgttcaacggaaccatccgcggcatcggtccgcgctactgcccctcgatcgaagacaaactccgaactttcgccgataaggaccaacatcagctctttttggaacccgaagggcgcacgaccaatgaatattatctcaacggtttttcatcgtcgctgccctgggaagtgcaatggaaagcgttgcataagattcagggattcgaagatttgcacatctatcgccccggctacgccatcgaatacgactattttccgcccacgcaactgcaccattccctcgaaaccaaactggtttcgggactctatttcgctggacaggtcaacggaacgaccggttacgaagaagccgcagctcaggggctgatggccggcatcaatgcacaccgggcgctggcaggggaggagcctatcgtactgaaacgcgacgaagcctacatcggtgtgctgatcgacgacctggtgaccaaaggcgtcgacgaaccctatcgcatgttcacctcccgggccgaatatcgcattctgctccggcaggacaatgccgacatccggcttactccgttaggatacgaaatcggactgattccgcagaaaagatacgaccatttcgtcaaaaaaaatacgctcgtagaatcgcttgtagagttcgcgcgccggcagagcatcaaagcagccgaaatcaacgactatttgaaatcggtaaattcagagcctttgacgcagggcaggaagctctacgacatcctgatgcgcaacaatgtcaccttcgaatcgctgcaaagagttcttccgaagctgaaaaaattcattgccgataacgaaatgagcgccgaaatgatcgaggaggcggagatacagatcaagtacaaaggctatatcgaacgcgagaaattcatcgccgagaaactccgtcgccttgaaaatatcaccattccgagcgatttcgactttcattcgatgaattcgctgaccatcgaagcccgtcaaaaactctcgcggattcgaccgacaacgatagggcaggcatcgagaatccccggagtttccccggccgacgtaaatgtcttactgataaaattcggtcgataa

SEQ ID NO: 2272 - DNA, 531 bp, Unknown
  Unknown gut bacteria
atgaaccccatcagaatcggtttgatcggcctcggccgaatgggaggatttttcctcgaagaactccggaagagcgaaaaatgggaggtcgccagcatctgcgacatatcgcccgaatcgcgcgcccgggcccgggaactcgccccggaggcgaaagtgatcgccgacgaacaggaaatcttcgacgatcccaccatacaggccgtgggactgttcgccctggccgactcgcggaaatcgcagatcgaaaaggctttcgccagcggaaaacacgtcattgccgaaaaacccatctccgacaacgtcgaaaacgaatggaaagccgtggaactggccgaaaacacgccgctcttctccacggtcaacctctatctgcgcaactcctggtaccacaatacgatcaaggatttcatcgcccagggcgagatcggcgagctggccatcatccgagtctgccacatgaccccgggactggcccccggcgaagggcacgagttcgaaggcccggcattccacgactgcggcatgcac

SEQ ID NO: 2273 - DNA, 1629 bp, Unknown
  Unknown gut bacteria
ctgctgctgacgctggccttctacatcaccctgacgatcgtagacgaggtatggctcatccgccatcaccactatttcgccatctgggcccggcgcgccgccgacgccatgctgctggcgcttcccgtctggttcctgcaccggaaacgatggctgtttccctggatcgtgctggtcaacctctacctgctgtcgaacgtctggtattaccgcatttattacagcatcatgccgctgaactcctacctgatggtgaacaacctccgggggctcggtccgagcatctgcgcctcgatgcgggcttcggacctgtggatcgtgcttccgtccgtctgtttcgccgccggatactcccttttcggccgccggataccgggaggagggggggggaaatgccgccgtgccgcgggatgtgccgccagcctgctgctgatcgtcgtcaccgtcatcccgccgtacttcaacgaccccaatgagttcaagcacccctggccctggtaccggaatgaaatcatgctgggactccacaaatacggtctgatcggctattggtcctatcagatcgcctatctgcacggctgctcgtccgaggaggccgaatacgccgcccggttcgtcgaagccgcagagcggcgcgcctcccgggaaccgctcacggaagaccaccgcaaaaacctgatcgtcgtgctggccgaatcgttgggcagttggccgatcggactggaaatcgacggcacggaagcgaccccattcatgaactcgctggcccgggacacgagcgtgctctacttcccgcgggtgctgccgcaggtgaaggacgggcggtcgtccgacgcccaactgatgctcaacaccggactgctgccgctcgaaagcggggccgcagccagtctgtacggctgccggaacacctatccttcgttacccaaagcgctggcccggagagggtatacctccgcatcgctgatctgcgattcgcgccactattggaatcaggaagccaccacgaagagttacggattcgacagatatcattacgaactgagccgcggaccgatgcgccgcgccgatgaagagctctacgaaaacggactcgaaattctgaaggaactgccgcagccgttctatgcccagctggtcacgatgtcgggacacggaccgtatgcgaaatcggatctcgaaagtccgctgaacaatgccgaaatcccggacgaggaagccaaatattatctggtcgccacacaatacgtggaccgctgcctcggccggttcatcgactcgctcaaaacatgcgggctttacgacaggagcatcatcgtcatcatgggcgaccacgactccatcacccgcaaccaatacgaagggcgcaaaaaacgggagctgagcgaccgctacatcccgctcttcatcctcaatgcgccgctgaaagccgaaacggggaaggtcatcgcacagatcgacatctatcccagcctgctggacctgatgcacgcacaggattacgattttcacggattgggcgaaagcgtcttccgccgccagagcgactgtgcagccgaccactcggaaggctgggtgggcggcaaccgcagcgattcggtccggcaataccggaaagagctgtggcgg

SEQ ID NO: 2274 - DNA, 804 bp, Unknown
  Unknown gut bacteria
ctctacttcgtcggcggagggcgcgattacatcatgaccggagagaaaacgttcgtactgcccgaagaggacgaaaaactgcccgacggggcgcagatcgccgatcatacctgctcgctgataaccgaatacgacgaccgcgtgcgcgtctatttcaacaacagcaccaaaaagctgctctatgtatcggccgtgttcggtctcgaagtggaggagggcagcacggtctgcgatgtagaaccgatgaacctgatggcctgcgacggcatgtattacaatcagcgttacgatccgggacatgtgatgctggtgggctcgaacggcagcagtgtgaaggtgttccgttttgcgacatcggtcggtattgccgataccgaggagaaactcagcgagatagatgccacggggcatatcctgccgacctcggccacgggtgtcaaccccgtcaaaccgatgctctattactcgcgcgggggcgacatctaccggctcaactacgacggcggcaatttcgatgcttcgccctatatctcgctgggcggcgatttcgacgtgaagcagatcgttttcaaccccttcgatgccaacacggtctatatcgccgcggataatctcggcgaggcgggcgagatgaaagcctcggtgtttgtctacgacgtgtcggacaacacctcggccgaaaaactcttcgaaggccatcgggccggcggctcggtcaaacagttgatctacaagggtaacggcaaggaatacgagtcgattcccgaaagcgggcagtcggcgttgagaaaactcttccgctga

SEQ ID NO: 2275 - DNA, 663 bp, Unknown
  Unknown gut bacteria
ctcttcaacttcgggctggagggacagaactactacaattcgcagaaagtcgccggagagtccaagaacacggcctacaatacgttcaacttccacgacatcgcctttcagatgccgctggccaggaaactgggactgggtttcagcctgacgccttacagttcggtggggtaccggaccaagtactatcacgagtacgatccgacggaccccgtgtacggcaacgtgggtaacgtccagtacaactatcagggcgagggcgacgtgacggaggtcaagctgggcatcggctgggaggtcttcaagaacttctcgatcggcgtggccgcccagtactactggggcgacatcgaccgcacgttcgtgatgaccccgacggcgatcacgggcgaaggaaactttatctcgacggtgggagcggacaattacagcatttcgagcgtcaagggacaggtcggagtgcagtggagggcgatccagaaccaaaaacgcctgctgacgttcggcgccgcctacgatttcggcggggacttgaatccggaggtgaccaagcggctctacatcggcgacctctacaacaccatcgtcaagggcgacacaacgcacctcaagctggtgctgccgagccagctggccgtgggcgtcacctacgagcccccgaaa

SEQ ID NO: 2276 - DNA, 1098 bp, Unknown
  Unknown gut bacteria
gtgggcgaatacgactaccacgtcgtgaaatgcctctacaagcccgttcccgaagccaagacctccgaggaggagctcaaggtgatcgagaaatgggtggacgccacggtcggcaatcccgtctaccgctacgagaacgccaaggactgccccgactgcggcgccaacgacgtgggcgacgacgacatcaagaacttcaaatacgccctgggcaacctcaggtactgcatggagaacttcgacaagtggatctccgacgaggacgaccccgagtatctctaccgcaacggcatctacaactacctctaccgccgctacaaacagctgctgacccaggtggccatcacggcctacggcgtgaagacctacgagcgcaaggccaacgaccccgttcccagctatgagttcacgccctatgcggaacagaaggaggccctcgacatcctctacgccaaccgctacatgcccgactgggtgcagcgccccgagctggtgcgcctgatgggcatccagcgcgaacgcatcgaggagcacaaggactacctcagcctgctgatgaacgccacggcgacccgtctgttcatctacgaggggcggggcaaggagcatttcgaccatgcgcgctacatccgctacatgttcgacaaactcttcgagaagacccgcaagggacagaagctctccgacgaggatttctactaccagacgaacttcgccaagacgatgatggcctcgtcgaaaatcgtggaccgcaacgccaagtaccggaacggttcggcatcggcgctcgcggcgcagatcgccggcgacccgaaggtcttcgatttcagcgaccccgaagcgtgcatgaaggccctcgacgagatgccgctgctctactcgacgaacggcgtggacttcggacgcgacgaggtcggcgcccagtacggagcgctgaaatactggcccgtgatcaacacgcagtcaacgcgccagctctactacggcatcctcaaggagctgcgtcagatcgtgaaaccctacatcaacagcagcgaccggcgcacccgcgaacactaccggttcatctacgagtcgatcagccggctcatcgactaa

SEQ ID NO: 2277 - DNA, 1275 bp, Unknown
  Unknown gut bacteria
ttgcaggcattcgcggcggcgacgctcggatacagtctctactatgtctgccgtacgagtctcaatgtcatgaagaaacccattctcgacagcggagcgctggatgcttcgcagctgggagtgatcggatcggcactcctgttcgcctatgccgtcgggaaattcgtaaacggattcattgccgactactgcaacatcaaacgcttcatggccacgggactcatcctctcggcggcggtgaacgccctgatgggactgctggggctggcgcattccgtaattcccacggcagtgatattcgtgacgttcgccgtgatgtgggggatcaacggctgggcacaatccatgggagcgcccccggccatcatatccctctcgcgatggtatcccctccgggaacggggaacctactacggattcttctcggcgcaccacaacctcggagaattcttctcattcctattcgtgggctccatcgtgacattcgcaggatggcaggcaggattcttcggatcggccgtggcgggagcgatcggtgtggtgatcgtcctctgctggctccatgacaccccggaatccaaaggactgccgcccgtagaagccctggcgcacgagaaaccagcgccggaagcggacaaatccgtacgggagattcaaaaacaagtgctccgcaccccggcggtatgggtgctggcggcggcgagcgcgttcatgtacatatcccgctatgccataaacggatggggagtgctgttcctgcaagaggccaagggatactcggatgtggaagcaatatccgtagtctcgataaacgccctgctgggaatactcggaaccgtgctctcgggatggttctcggacaaactcttcaagggagaccgaaagattctcgccctgctgttcggcatactgaactccctggcactggcactgttcctgtacggaggaaatgccatgtgggtgaatgtcctctcgatggtcctgttcggaatagccatcggagtgctgatctgtttcctcggaggactcatggccgtggacatcgtgccgagaaaggcgacgggggccgcgctgggagtggtggggatagcctcctactgtgctgcgggaattcaggatgtcgcgtcgggatggctcatagatgcgaacattaccgtaacggcagatggcgccaaacactatgacttcggacctgtggccgtattctggattacagcgtcaataatatcgtttctgctaccgctgatgaaccgaaagaaaccgaccgaagcatga

SEQ ID NO: 2278 - DNA, 1464 bp, Unknown
  Unknown gut bacteria
atgcttatgaaaatcatcaaactatatttcctgatggcgctggcgctgttgtcgggcggctgcaagggctggctgacgatcgactcgtcggaccgtatcatggagaacaccctgttcgagaccgaggaggggttcttcacggcgctcaacggcgtctatgccgagttgccgcaggcgagcttatacggcaagtcgctcgcggccgtcacgttcgacgtgcaggcccagtatttcgataccacgcagccttcgacccataccttcaacacgctgggcgcctactccgcggaggcccgcaagacggccgtcgccgatacgtgggacaaagcctatttcgtcatcgccaacgtcaacaagattctcgaacattgcgagagcgaccgcgatgtgctctccgaccgcgcctaccacatcatccgcggcgagatgctgggcatgcgggcgttgctgcacttcgagatgctgcgcatcttcgggcccgtcttcgcggaggctcccgcccgggtttcgattccctaccgcacgagcagcgaactgaccgtcacgccgctgctgcccgcgaacgaggtggccgaaaagatcgccggggacttcaccgacgcgctctccgaactcgctgactgggaccccgtgcgcaccgaggggcggttgaacggcgaaacgaccggttcggtgcgttaccggagccgtcacctgcggctcaattactttgcggtgaaggcgttgcaggcgcggctggccatctataccggcgaccggacgctggccgggcggctggccggggaggtgatcgacgaggccgggccgttctttcccttcgcgtcgcgcgaggatgtgaccgggcagaccgccgtcggcgtggccacgcagaactccgaggaccgcatcttctcgtcggaggcgctcttctcggcggtcaactcgaaacgcacgagcgacatccacgacaaattcttttccaacaaactcgaacaggtcaacctgctcacgatgggtgaactggccgtgcacaacctctacgattcggaaagcgacctgcgcacctaccagtggcagacgctcaagaataccgagggcgtggaccagcgtttcttcgtcaaatacgggcaggtgcaggacatggacctgggttacgcctcgatggtccccgtcgtccggatggcggagatgtacctgatcgccgccgagtgcgaggactccaaggcgacggcctacgggtggctcaacgcgctgcgttcggcccgcaaggcgacctcgctgcccgcgacgggaacgctgagcaacgatctcacggaggagtacatccgcgaattcgtcggcgaggggcagctcttctggtactacaagcgtctgcgcaagacctcgatccggaaagtgtacagcaacaacggcggctatttggagttcgacccggcgaattacctcttcgcgctgcccgagaaggaacaggagcaccataaatag

SEQ ID NO: 2279 - DNA, 609 bp, Unknown
  Unknown gut bacteria
atgaacagcaaagacgcagaaactccgatcaccagcttcaccctcagcaagctgatcgccatgtccggcggcgagaaacgccccggcccgctgggggaatgcatcgccaccagcagcgccgcgcaaatggaggtattccggtttccgggacgcctcgacgctttcgtcatcggcgtgggaaccgaaggcgaaacgaccttcacctccaacctgaaagaataccggctgaaaaaggactcgctcttcatcgtcggaccgaagcatatcctgcaaatacagtccaacaacagcttcaaggcgcatgtcctcgtcatctcgccggacttcctgcgccgcatcaacatcgacaccaaactcctgatgccgctcttcctgcaattcggatcgcgtcactgcatggagctcacccacgccgaatgccagtcgctgcgcagcttcatctcgatggtcgaacaggaactcgaaggtcccgaaaccgactttgcgatcgagatcgtcagcggactgatcgcggcgacgatttataaggtcggcgacatcctgactcactacatggagaagcatcccgagatggacaatcccgtgcacaaccgggccgaggagtatttc

SEQ ID NO: 2280 - DNA, 1392 bp, Unknown
  Unknown gut bacteria
atgatacgaaaaggcctattcctcgtgtgtgcgctgctcatcccggcgctcctgctggcagccaagccctcgaaaagcaagggcaagaacaagaaaaaagcgaaaacggaacagacggacaccgcctccgtcaaaaaaacctccgactacgacaagctcttcaagggcaagaaatgtcagaccgtcaagggcctcgtgaccatccacaaggtcgatggcgagaagctctacttcgagctgccgatgtcgatcttcggccgcgagatgctgctcggatcgaccgtttcggagaccagcaacaacgaccacggcgtagtgggctacaaggccaaggacccgctgcacgtgaccttcgccaaggagggccacaagagcgtgcagctctgcctggtcaacgacatttacagcggcgacggcaaggacaagggcatcgacgaagcggtgcgccgctcctcgatcccgggcatctaccgcgccttcaagatcgaagcctacaacgccgactcgacggccgtggtgatcgacgtgacgaacctcttcatggaggacaacgacgatctgacgccgttcgacccgtacagcaccttcggctacaagcccttctcgcgcaccacgtcgttccagaagtcgaacagccatctgggcgacatcaaggctttcgaggacaacgtgaccgtcaagagctacctgagctacaccaccaccgtaacctattcgaacggcccgatgatcggcaagatcgaggacaagcgcgccttcacggccctcgtcacccgcacgctgctgctgctccccgagaaggagatgcgtccgcgcatcgccgacccgcgcatgaacatcttcgtgacgggcaaggcccgcttctcgtcgaacatgaaccgcggcacgctgcccgtctactacgcccgccactggcgcgtggagcccaaggatgtcgaggcttataagcgcggcgagctggtcgagccggtgaaacccatcgtcttctacctcgacacgaacctccccgaggcgtggaaaccctacgcccgcgagggtatcgaacaatggaacgacgccttcgagaagatcggcttcaaaaacgtcgttcaggtccgcgactaccccaccccggaggaggaccccgaattcgatcccgacaacctcaaatattcgtgcgtgcggtatgccccggtgacgattcagaacgccatgggcccctcgtgggacgatccccgcacgggcgagatcatcacggcgtcggtgatggtataccacgacatcgtcaaactcctgaaccgctggcgcttcctgcaaaccgcagccgccgaccccaacgtccgcacgatgaacatccccgactcgatcatgggcagcgccctgcgctacgtcctctcgcacgaggtcggacac

SEQ ID NO: 2281 - DNA, 669 bp, Unknown
  Unknown gut bacteria
ctcgccgacaccgaaccgtggaaggtgatcaaaagcgatccgaagcggggggagaccattctccatatcgccctgcaaattacggcgaatacggccattgccatcgaacctttcatgcccttctcggcagcgaagatcctcgggatgctcgccgtggagaaattcggttgggagcggctgggagcgatggatctgattcccgccggacacacgatcggcgaacctgccctgctgttcgaaaagatcgaagacgacgtgatccagcgccagttggacaaactcgctgcgacgaaggccgccaatgaagccgccgaaatgaatcaatctgttgaacctcaaaaagatacgattcaattcgacgattttcagaaaatggatattcgcgtttcgacgattctggaggctgaaaaggtggccaaaaccaaaaaattgctgaaactgacggtcgatacggggatcgacaaacgggtgatcgtatcgggaatcgccgaacacttcacgcccgaagagctcgtcggcaaacaggtcctcgtattggtgaaccttgctccgcgcgaattgaagggcatactctccaacggtatgatcctgatggccgaagatgcgtcgggaaaattgcgtttgttacagcccggagaaccgaccaacaacggggctgtcgtcggatag

SEQ ID NO: 2282 - DNA, 966 bp, Unknown
  Unknown gut bacteria
gcgaacaaatggtaccaccagttctacggacaggcgctgatcatctccaaccgcctcgacgaagcgctgaaagtctaccgccgcctgctggagaacgacccgaaggacccggacaactaccgcatcgtggcggccctctacgaacagaaacggtcgccgttcatggcccttgcgacgctcgattcggcagagctgcgtttcggacacatcccgctgctgagcgccatgaaacggcagatgctggtggccacgaaccagatcggcaaagccatcgacgaagcccgtgcgatggtcgaagccgcgccctacgaagcgcagcaccacgtcgtgctggccgacctctacgggctcgacggcaaggactcgctggccctcgccgagtacggccgggcgttgcagatcgactccacgaacgtacagacgctgatgtcgctggccgatttccacaccggacggcaggattaccgctcgctgctgaccgtcacccggaaactgtttctctcggacgccctgccgctcgaaacgaagatcaagcgcttcgaacagttcacctccgacacgcgcttctaccgcgaatactatttccagttgaacgacctggcctcgatcctggcgatccgctatcccgaggatcggcgcgtcgtggagctctacgccaaccacctgatcgcctcgggcgaactggaacaggcccttacgctctacaagagccgtctcggagaccgtccgcccgtggaggacttctaccggacggtgatcgacatcgaaacctacctgcaacaccccgattcggtggaaaaatacgtcggcaaagcgctggaactcttccccgacaaggtcgatttccacatctcgaaaggacatgtgatgaacaactcgaagcagtacggccaggcggtcaaagcctacaaagaatcgctccgctacgccgacaccgactcgctgcggggcgtgatctggggcatg

SEQ ID NO: 2283 - DNA, 1530 bp, Unknown
  Unknown gut bacteria
atgaaaaagagctgtttgttcgcggtttccgcactccttctgctgctgggcggctgctacggcgacaaggggaattacgattaccgcgagatcaacgaaatcgtcatcggggcccggggcttcgagggcgtggaatacaaattgcgttcgggcatcgacgaactgaaaatcagcccctacatcaccgcgtcgcaggaccccgggctgaccgggagttacgaatacgaatgggtggtcgtcggtcaggtccgcaatccgggcgagcgcaccacgatcgcccggacgcgcgatctggactatgccgtgaacctgcccagcgacgactattcgctgctgctgcgcatcaccgaccccgcgacggggctgatgttcagccgcagcaccacgatctcggtcagcacggcctatacgcgcggctggctggtcgccgccgaggacgaggagggcgccgccgtcgtggacatggtgtcgatcagccgcgacacgctgcttcaacgcgacgtggtcagggacgacacccgccaccgcaatcccctgcgcatctggtgcgacaacaacgagtacacttcgctggtgcacgggcgcatctacctttcgaccggagaggggagtttcctctacgaccgcgaatctttcgggacggacgactataccgtcatgcgcaactacttcgccaatccgcagtacctgacggagaccgccgcttcggacatgatccagatcgacgacaagttccgcatctttctggtggacggctacgcgtacgtatacagcatttcttcggtcaacacgggctatttcggcaatccggtcaaccgttatgccgagagctacgactacgtgcgcatcggcgaccggatcgcctacaacctgagcggcggaagcggcgccgggtccatcaccaccgtcatgctctacaacgacgacgacaagcgcttctgctacctgatgcgcaacgacgaaaccctgcggaacgccgccgacaccgaatcggaccttgccctgttcccctggcggacggggctggattatgtgacgaccgtcaattcgcgcttcctttcggggcagtcggctacgatcctgcacgacgccccggcggggaaatactggatctacacctacgcctgcctgcggtcgggtcccagcaagggggcgcgttacgagatcgacgcttcggttcccgtggcggaggccgcgaactggtgcatgacctcgcagcacggctatatgctctactcggtgggcggcgtgctctacggctacgatttccgcaatggccggaagcccgtgcagctgctggatttctcgcccgcggagatcacgcagatccacggcgacatccacaccgtggccgaaggcaacagcgattgcgtttatgtctgcacctacgaggcgggcactccggacagcggccgcatccgcaagtatgcggtggcggacaccgccgaccggatcgaactccaggccgacgaaaataccgattggacgggattccagcgcatccgttcgctgtggttcaaggaactgtaa

SEQ ID NO: 2284 - DNA, 2121 bp, Unknown
  Unknown gut bacteria
atgatcgaacgctgctgcaaatatatcctcctcctgtggacgatgtcgttctgcgcccatgaggtctgggccggcccgcagtccatccgccagctccccaacctgacgatccaccgcttcgcgcaggacaaggtgggctacgtctggatcgccaccgacaacggactctgccgctacaacggacaattctactattactaccagaacgaaccggaagacccggcgtcgctccccggcaaccgggtgtccgacattcgcagcgacgaaaacggcacgctgtggatcgtcacctccgaaggggtctgcacctacgatgcgcggctcgacaatttccggaggctgcccggcacggaggggctgaacagggcggtgttcagcggggaatacgtcgtctgctccggccccgccgggatgacgctcttcgacggcagcggccgtctgctcatcgagaagcgggatacgccccggcacggccccgcggtgctcgaagccgatctgaacggatttttgtgggggggggaaaccggaggcccgattttcaaatacgacaacaacctgaatatctgcgactcgctggcgctgcccgactccgcggaatttctgagcagctgccgcgactccgaaggccggatctggttcgggacttcgaacggagtgcgcatcgtcgatccccgcaccgatgctcccgccgaaacggacggaccgctgaacgaatgtatcgccgcgctctcccagtccgccatactctcgctgacggccgtagacgacacggtctacatcgggacacagggggacaacctccaccagatcgacatccggacccgcacgctgaaaaagaacatcgtgacacggggaacgcccgggctcaactacaccagcgacttttcctgctgtttccgcgattcggaaaacaatttctggatcggcacgctcgaccggggctattcggtgcgctatgccaatgaaaaggagttcacccggtcgatccggctgggcaaacagaccctgagcaagttcgtcaacgccatcacgatctcgaaagacggcacacgctggatcgggagccgtttcaaaggcatgctggcctacacctcgcagctcgacctgaaatggcacacgctggaaaactgcaccctcatgcagcggctcaacagcaagaacgtatcggcgctcttcgccgattcgtccggacatctctgggtcaacatcgacgaccgcatcgcctgctgcaacacccgccatcagacgatcctcgactacaccctgcttccggaacgcttttcggccaaccgcttctgcgaggacgcccggcacgacgtatgggtggcgacgacttcggggctcctggtgtacgacggcatgcgcctgcgggacgcatgcttcgagggctgcgacgtgcaggatgtcatccgcctcgacgacacgacgatgctggcggcggtattccggcggggacttttcgccatcgacagccgcaggctcgaacggcggcccttcctcgaagccccggacagccttacggccaccgcgctccgccatgcgacctgcctgctgaaaggccggggcggcaggctgtggatcgggacccgctcgaaaggcctgctgcggtatcatccgacggaggggttcagaacctacaccctgaaagacggtttcgccagcaacgaaatcgcctccctcgcacaggaccggaaaggcgacatgtgggtggcgacctcctacggtctttcgctcatcctctccggaacggaacggatcatcacctacctgcgttccgacaagatgcagacccagcagttccatccccggtgcgtctgtcagacatccggcatgctctacttcggcggaaacctggggctcgtgcatttcaggcccgaaagcgtcctgcccaagatctcggaacgccccgtgcggctggtgctccgggagctcaaagtcaacagcgtcgcccagcacccctccgacgacggaatcctcacgcagcagctcgacgacaccgaacggatcgtcctcgaccacaagcaacgcaacctcgacatcagctacgaggcgctggcgttcctctcccccgagaaaatccgctacgcctaccggcttcacggcggcgacatcgacgaggag

SEQ ID NO: 2285 - DNA, 1806 bp, Unknown
  Unknown gut bacteria
atggaaaaattttataaaacaagcatcgggtacgccagagcgctgaaaagcgcgggcatcgccctgcttctcgtgatgttcctgtcggtgagcgtcgatgcagtccatgcacagggcgcctccgcacagacggggaaacgacgcatcaccggaaccatcaccgacgccgacgggtcgccgctggccggcgccaccgtctacatcaaggacaccaacgtcggaacgacgaccaacaccgaaggtctcttcgtcatcgacgtactgcccaaacagcagatcacggtcagctacatcggctacctgtcgcagacgcttccgaccgacggccgcgaagtgttcaacatcaagctgcaatccgacaccgatcagctcgaagaggtcgtcatcgtcggctacggcaagcagaaacgccaggcgatggtcagctcgatcgccaccgtcgggtcgcgcgacctgatgcagtcgtcgtcgagcaacctgacgagcaacctcgccggacagctcgccggtctgatcagcatccagcgcagcgccgaaccgggacgcgacgacgccgagttctggattcgcggcatcagcaccttcaagggcggaaccaacccgctggtgctcgtcgatggaatcccccgcgacatcaacaacatcgaagccgacgaaatcgagacgttcagcatcctgaaagatgccgcggcgacggccgtctacggcgccgagggtgccaacggcgtcatcctcgtaaccaccaagcgcggtacgatctcgcggcccaaaatctcgttccgcatcgagcagtcgatcgcctcgccgcagcgtctgcccgagttcgtcgattcgtgggactacctcgaactggccaacgaggcccggtccaacgacggactcacgcccagcttcagcgccgcgcaaatccagctctaccgcgaccgtgcggacaacgacctctatccgaacacgcagtggatcgacgaactggtccgcaaagccgtgcacagccagcgctacacgctcaacttccgcggcggcgccgaaaatgccaaatatttcgtctcgatggcctactaccagtcggacggcgtcttcaaggagaaccccaacggcaaatacgacagcaacttcggattcgagcgctacaacctgcgcagcaacatcgacctgaaagtgagcaaaaccacgcgcctgagcgtcgatctctcgggccagtacgtacaccgccgcacggccaaccgttcggccgacgacatcttcagcttcatgctgcacacgccgtcgtacctcttcccggccatttacagcgacggcacgctcgccagctacgaaaagcaggccgactcgaacaaccgcaacccctacaacatgctctacaaccagggctaccgccaggagtggggcgtgaagatccagtcgaacatcaaactggaacaggacctgaaattcatcaccccgggtctgagcgtccgcggaagcgtcagcttcgactacgacggcagttcggcgacgctgcgcgactactggccgagcctctaccacgccagcggccgcgacgccgaaggcaacctggtcttcaccaccacctcgtcgggatcgcccgagatctcggacccgaaattcacctcgacgagttacctgcgcaagatctacatcgaaggcgccgtcaactaccagcgcacgttcaactatgtccacaacgtgagcgccatgctcctctacatgcagaaggagcagcagaagaacgatccggtgctccccttccgcaaacagagcatcgtgggccgcgtgacctattcctacgacaaccgctacttcatc

SEQ ID NO: 2286 - DNA, 723 bp, Unknown
  Unknown gut bacteria
atgaatgttttctggcagacgatcgccggctataatgccgctacatggcccttgcaggcattgctggtcgtcgcgggcatcgtgctcacggcgttgctgtcccgccggccttcgccgcgcgtgaaggtggcgatgaaagtttatctcgccctgctcaacggctggatcgccgtggcctattacctctgggcctgcgccgagcgcccttacagcggggtgatggcgatgttctggggcgtgatggccgccgtgtggatttacgatattgcggtgaattacaccacgttcgagcggacccgcaagcacgaccgcatcgcgttcgtcttctacctcatgccgttcgtctacccgctcttctcgctgctgcggggattggagttccctatggtcacctcgcccgtcatgccctgttcggtggcggtcttcaccatcgggctgctgctcgctttctcgaaacgggtgaatctgttcgtgattcttttcctgtgccattgggcgttggtgggcttttcgaagatctatttcttcggcatccccgaggatttgctgttggccagcgcgtcggttccggctctgtacctctttttcaaggagtatatcgacctcaatttccaccgcgacaccaagcccgacctccgggtgatgaatttcctgctggcggccatgtgcaccgccctcggggtcttcttctccgtgaccatctggcagcagtttatcggttag

SEQ ID NO: 2287 - DNA, 1116 bp, Unknown
  Unknown gut bacteria
atgagaacaattctaccccggaaaatccccaaaaggagcgtcacatcgccgatcgcggtcctgctgctgaccgccgcgatcccgctgggcaccgcctgcgacgatgacaaggactactcccgcagggaatacatcgaatggtcggacactccggaattcgacaggaaacccgacatcctccatttttccgtcaacggttcgccggagaacggctgcaatgcaatctacgtcaggacgaacgtacccttcaccgcgaccgtggagttcgaagaggacgaagacaacggggaagcggcggtccccgcctggctcgaactggtgaagatcgaacacgactacctgccgggcatctcccgcctgctctgcaaggcggccccgcatcccggcacctataaggaaagaaaaggctgcatctcgctgcacaccgaggtcgaatacctgaacgatttcattccgatcgtacagggattcccggcccgcgtcgaaggcgatttcgactggctgaaatacggctcggccaacccgctggaaacccgcggagaaacggcgatctccggctggaccgccgaacagaaagacaaaggctgggaatcgacccccgccgaagaggagggcacggcccactgttacggcaaaaacggctacgtcaggctgggcgacgacctcggacacggggccaacctgctgtcgccctacaagccggaaatccggtcggacacggcggtcctggtccggttcaacgccatagcctatgcggcggccgacggcacgaaagacgccaacgaactgaccgtaacggtcaagggcggcgggcagttcctcgacggtgcgacttcgaaaaaactcgttctgaatcatttcgatccctcggacgaagagctgccggagagcatgtgggagaattcccggcaggagttcatcgtcgtctcgcaccccaaaaacacgttcacgagcaacacccgcatcgaactcatggccggcgactacgtcatggagtcgggcaacacccgcatctttatcgacgatttctacattttcaggctccggtggtacgactacgacgaccttttcgggggcctgccctgggagcagcaaaagaacgaatcggggaaataa

SEQ ID NO: 2288 - DNA, 1521 bp, Unknown
  Unknown gut bacteria
atgaatatgaataaacaactgattctggctgcaaccgccgtgctcttggcttgcagcccgttgcacgcggagcagatgtggcccttctccagtaagaaaaagaaggccgcgaaggtcgagaagacggactccgtgaagaaagaggacaaattcgacaaggccgtcaagggcgcccggaaaggcagcggcctgttcgactactatctgacgaagacgggcgaactgctgctggccgtcacgccccgcaacctcaaagccagctatctgctggccaaccggatttcggagatcagccagaattccaatttcgtggccggacagatgctgggcgatccgttcatgatccgcttctcggccgatacctccaacgtctatctccacaaggtcaaccactgggagcgcgtggcgccgaacgaccccatcgagaagtcgttccgccgcaacgtgcaggaccccatcacccggaccttcaagatcaaggcttcgcgcaacgacacgctgctgatcgacgtgacctcgttcttcgtgtcgaacgacaagctgctcaagccgatccgccagagcccgctggttccgggcgagatgagtgcgacgtacgatgccgccggatcgaagctcaaggaggtcaaggtcttcgaaaagaacctcgaaatcaccagcatcctcaattacaactccgagccggacggctacacggtgaccgtgcggcggtcgattctcgaactgcccgaggagccgatgaaggtccgctggcaggacaaccgcgtgggttatttcagttcgaaatattacacctacacctcgtcgaaggacaagctgctgacgcatgagatgatccaccgctggcgcatcgagccgaaggagggcgaatgggagaaatacttccgcgtcgaactggtcgagcccgagcgcaaaatcgtcttctacgttgacgacgctttccccgacaagtggcgcgaggtggtgaagctgggcatcgaggattggaacaaggctttcgaggccgccggtttcaagaacgtgatggaggcccgcgactatcccgacgatccgtcgttcgatcccgacgccatccgctacaactgcatccgctacgccgttaccgacgtggccaacgccatgggcccgagctacaccgacccccgcacgggcgagattttggtggccgacgtcatctggtatcacaatgtcatttcgctggtgcacaactggcgtttcgcccagacgggagccgtcgatccgcgcgtgcgcaagcaggtcttcgacgacgacgtgatgcgcgagtcgctgcgctacgtggccgctcacgaggtgggccacacgctgggactgatgcacaacatgggtgcgagctactccttcccggtggattcgctgcgcagtccgtcgttcacgcagaaatacggtacgactccttcgatcatggattacgcgcgcaacaactatatcgcccagcgcggcgatttcgagcgcggcgtgcggatggtgccgcccctggtcggcgtctacgacatccacgcc

SEQ ID NO: 2289 - DNA, 1122 bp, Unknown
  Unknown gut bacteria
gacaagaccaagaactacaaggcgacgatcatgtggggcctgatcgtgatgagcatcggctatctgctcatcgccatcccgacgccgacgcccgtgccgagtctgtggctctacctgacgctgacctgcctgggactgctggtgatcgccttcggcaacggtctgttcaagggcaatttgcaggcgctggtgggccagatgtacgataacagcgaattcagcgccaaacgcgaatcgggcttccagatcttctacatgttcatcaatatcggcggtttcttcgctccgttcgtcgccatcggcgtgcgcaactggtggctgaaggtcaacaatttcgactacaacgccaaacttccggctctgtgccacgaataccttgccaaaagcgaggagatggtcggcgagggcctcgccaacctcaactcctacgcttcggcggcgcacctcgacggaacgcccgtgagcgacctcggggccttctgcaacacctatctcgatgtcttcaaccgcggtttccactatgcgttcatcgcggcgatcgtgatgatgctcatctcgctggcgatctacatggccaaccgcaagcggttccccgatccttcgaaaaaggccgctgccgccggcgtcaaggcttcggccgaggagatcaagatgtccgcccaggagatccgccagcgcatctacgccctgttcgccgtcttcggcgtggtgatcttcttctgggtgtcgtgccaccagaacggctattcgctgacctatttcgcccgcgactacgtgaacctcgacgttatcaacatcgatctgggattcacgaccatcaagggcgcggagatcttccagagcgtcaatcctttcttcgtcgtcttcctcacgccgatcatcatgtggttcttcggctggctgcgcaagcgcgacatcgaggtctcgaccccgatgaagatcgccatcggcatgggcatcgctgccctggcctacgtcttcctgatgctcttctcgctggccctgccgacgaaggccgaactggccggcatgcgcgccgacgaggtgcagtcgctgctggtcaccccgtgggtgatggtgggcctctacttcatcctcaccgtcgccgagctgttcatctcg

SEQ ID NO: 2290 - DNA, 1239 bp, Unknown
  Unknown gut bacteria
atggaaaaagagagagacgaactgctgggcgacctgttccgtgcctatttcgacacgcgacggcacaaacggaacacgagaagccaactgagtttcgaattcaatttcgaacacaacctgatagaactctgcgaccggatagcggacaggacctacacgccggcgcacgccatatgtttcatcacggaggagcccgtcaaacgcgagattttcgcctcgccgttcgcacacagggtggtgtgccgactgctgtacaactacattgccccgatgttcgaggcccgcatgattcacgacagctattcgtgccgcgtgggcaagggggtgttcgtggggattcggcgtttcgaacaccacctgagaagctgcacgaggaactactcccagacggcctatgtgctcaaactcgacctgagaggctatttcatgagcatagaccggtgggtgctccacggagtgctgatgcgggaactcgatgcgaactggcgcaaggtgtcgggaaacggcagaaggtggtgcgacaggctcgacagagggctgatcgactatctgatacgggtgattcttttccgcaacccggtgagcgactgcatcgtgctgggacaacaatcggactgggacggactcccgccctcgaagagcctgttccacgccccggagaatgtggggctgccgataggcgacataacctcgcaactgttcagcaacattctgctggatcagatggaccgcttcgtgaaacgcaacctgaggtgcaggcactacggacgctatgtcgatgatttctatgtcgtgcatgccagcaggcgctatctgaagagtctgacggcatgtctgcaatggtttctgcaatcggaactccacctgacgctgcatcccgacaagatcgtgctgcaaccctatcactacggagtggcgtttctcggggcctatgtgaaaccctaccgccgctatgccacgaagtcgtcggtcgaacgcttccgcagaaagatcagagtgctcgaagcggaatgccggagaggggaactgacctatgtcaggctcctggaaatcagatccgtgctgaattcgtactgcgggcatttctgccatttcaaggcttacggaatgctccggacgcaattcggaaagtcgcccctgaggaaattcttcgactttacggacggatacggaaaatccgtgctgaaaaagaaattcatccccgaggggataccattcgacggaacgcaggacgactga

SEQ ID NO: 2291 - DNA, 990 bp, Unknown
  Unknown gut bacteria
atgcgaaccgatttgtttctctttctgaccctttctctggcggcaatcacctcgtgcgacgaggcatccggcgacagatacgacccgtccacctacaaaaacccggtcacgacacagaagatgccggaccccacggtcatccgcgacggcgacacgttctatctttatgcgacggaggccgtccgcaacgtgccgatcatgaaatcgcgcgacctggtcaactggacgctgtgcggcacggtcttctccgaggccacgcgccccgacttcacggagggcggcgagatatgggcccccgacatcaactatgtcggcgaccgctatctgctctactattcgctctcctcgtggggcggcatcgaggactgcggcatcggcgtcgccgaggccgagacgcccgaaggaccctggatcaaccacggcaagctgttcatcagcaaggagatcggctgtctgaactcgatcgacccgttcttcatcgaggaggacggcgcgaaatacctcttctgggggagtttccgcggcatctggggcgcccggctgtcggacgacgggctcacgctggacacctcgaccattcagccggtcgccggcacggctttcgaggccacatacatccacaaacgcggaaactactactacctcttcgcctcgaccggcagctgctgttccgggctgaacagcacctattcggtcgtggtgggacgctccgagaatctcttcggcccctatgtggaccgcaacggcgaggagatgctctcgaaccattacgaaacagtcctgaagggcaacggagccttcgccggaccggggcacaacgccgagatcgtaaccgaccgcgacggcacggactggctcctctaccacgcctactgggtcaacagcccgagcagccgcaccctgatgctcgaccgggtgaactggaccgacggctggccgctggtcaacgacggctatccgtcgaatcaggccgcttcgccgcgcctctga

SEQ ID NO: 2292 - DNA, 933 bp, Unknown
  Unknown gut bacteria
atgttcaatcctaaatgcgtacaagcgatgaaatcattccatatagtcgcactggccgccgtcgcggcgcttgccgcggcgtccggatgcagtgacgacgtgcagaaaaccacctattcgggcagctcgggcttcgggttcgcggcttcggtgctcaacgtggaggtcgggtcggcgaatgccaaccagattctcgtgccgatctaccgcggcagcgaggacgcccagatcgccgagctgaaattcgagtacgacatctccaaggcgggggcctccgaaccctattggtccgacgccgatcccgcgggcatcttctcgctgaccactcagcgggtgatcttcgccgacggggcgaaggtggcctatgcgcaggtgcgtttcacgaacctcgacctgctgggcatcaccaccaaatacaagatgcgcctgacgatcaaggactccctgagcccttcgaaacgcagtcaggtgacgatgtccgtgagccgccagctgacgttcgactacctgggcaagtgcgattaccgcgacgcctgcgtcttcgacggcacctacaaggccgacatctaccgggcgcaggaggcggagatctaccgggtgatggacccctataccgaggggcttatcaaggaggagtacgctgagaacggctggatgggaactccggcgccctacgtgcagttcgccgtcgatgccaacgggcagatcacctacgaaccgttctgtacgggtatgatggtcaatgcgaaatatacggcctatgcctattatccgggcgagtatatctggggaaaggatttctcggagtacaacaaggagaataagaagctgtcggacaaggtgttgcagctttatcccgtttactgcctgcccgaataccagtacggatttctcaacgacggagcttatccgctgaccgtcacattgccataa

SEQ ID NO: 2293 - DNA, 1602 bp, Unknown
  Unknown gut bacteria
atgcgtaaagtcagatatctgttgcttgcggcgttcgtcgccgcctgttgcggcggggcggtgtccggctgcggaaaagaggacgcggactccgattctgccgggaaaaagagagtctcggtgctgatgaaggtcggcacccgcagcgtcgatgcggcggacggaacgccgacggacgcggaggcggctctgcacacgctccgcgtctatgccttcgtcggcgacgagcgcgtcggttattattacagcgacggcggccttgaggcatccgctgcgttcctgatggatatgaccctgaaatcgacatccggtcagaaggtggatttctatgtcgtggccaacgaggcggcgatggtgaccctcggcgtcagcggcggcctgtcggagacgacgactcccgcgcagctcaggcagttccgcttcacgcagctcgacctttcgaaggggctgccgatgtactgcatgacgacggagacgatcgacgttgccacggacgacccgaacaatcctcccgccgaaccggggcacgaaggccatacgctgctggcgcagaagctcgaattcgaactccggcggcccgtggcgaagctgggggttttcgccgccaagcgtccgggcgaggcggccgaactgcgcatcaccggactgacgatgctggagcagggcacgcgcatgcacaactacctgatgccgcaggatcgtgcggtgctggagcaggtgcagtcgatgtcggcgcccttggaactggacccggtcacggcggcggtcggcgaactgacggttcccgcgaccgcgaccgaggaggaggcccgccggaatccggccaactacacgccggtgctcgacacgccgttctaccccttcgagaacccgtggggcaacggcggaagctgggacatcccgggcgacgaacagggcaatgtgctgaagatcgactacgagttcgggggcgagagccgcacggggctgatcttcctgccggcgatggagcgcaaccgctactatacggtgtgctgcctgatcagcaacacgggcaaattcaccgtggagtacatggtggccgactgggaggagggcgattcgtgggacgacctgatcttcgattacccctcctacaccaatccgctttcggccgaaccgaccgcctcgacggtgcccgcagaggccccgacgatcttctataatcccgattacgacccttcggatgacgacacgttcgtcgagggggcgcttgaggcgcaggggagctgttcgttctttttccagctgtcggccccttcggggcaggtctggacggcgacgctgctcgatgtctcggcggccgactattcggtgacggtctatgacgccgccggccggaagacggatattccggaggcgtcggacgagttctaccggatcgtcgtgcgcgcgctgaacgacgatcccgcctatgtgggccgaatcatccggctggggatcgcctacacgccgacatgggagggcatgggcacgggcagtttcctgcttatcaacggctcggacggcgacatcaaatggccttgccactccgacggccggcaggtccccgaattgatcgagatcaaacaagttgctaattga

SEQ ID NO: 2294 - DNA, 699 bp, Unknown
  Unknown gut bacteria
atgtaccgatttaccacggcaaccaaaaaactcctcggagacctgcatacgccggtcagcctctacctcaaactccgagatgtctatccgcagtcggcgctgctcgaaagttccgactaccacggcggtgagaacagcctttcgttcatcgccttccgccccgtcgcccgcatcggcgtgaacaacggcgaggcgcttctggaataccccgacggccggagcgttgcgaagcccctcggcgaaacctgtgcggcggcggacgcgatgaaagaatttctgaacgaattccgcgtcgacggcgacgggagcgagctttgcggcctcttcggctatacggcgttcgacgcggtgcgctatttcgagaacatccccgtccgggagttccaccaccgcgattccgatgcccccgacatctgctacatcctctacaagttcctgctggtcttcgaccacttcaagaacgaactgtcgatcgtcgagctgtgcgccgacggcgagcgggaccacatccgcgaggtcgagacgctgatcgaggaccgcaatttcgcttcgtacaacttccgcacggtcggcgagcgccgttcgaacctcaccgacgagacctaccgggagatggttcgccagggcgtgcgccactgcctgcgcggcgacgtgttccagatcgtgctgagccgccgcttcgaacagccgtttcagggc

SEQ ID NO: 2295 - DNA, 1137 bp, Unknown
  Unknown gut bacteria
atgaaccgcttcacggaattctaccgcatcagtcccccggccccggcccgcgagatggacgccgccgcgcgctcgaaatactaccgccgcctgcgtttgcaggcattcgcggcggcgacgctcggatacagtctctactatgtctgccgcacgagtctcaatgtcatgaagaaacccattctcgacagcggaacgctggatgcttcgcagctgggagtgatcggatcggcactcctgttcgcctatgccgtcgggaagttcgtaaacggattcattgccgactactgcaacatcaaacgcttcatggccacgggactcatcctctcggcggcggtgaacgccctgatgggactgctggggctggcgcattccgtaattcccacggcagtgatattcgtgacgtccgccgtgatgtgggggatcaacggctgggcacaatccatgggagcgcccccggccatcatatccctctcgcgatggtatcccctccgggaacggggaacctactacggattcttctcggcgagccacaatctcggggaatttttctcattcctcttcgtgggctccatcgtgacattcgcaggatggcaggcaggattcttcggatcggccgtggcgggagcaatcggtgtggtgatcgtcctctgctggctccatgacaccccggaatccaaaggactgccgcccgtagaagccctggcccacgaaaaaccagcgccgggagcggacaaatccgtacgggagattcaaaagcaagtgctccgcaccccggcggtatgggtgctggcggcggcaagcgcgttcatgtacatatcccgctatgccataaacggctggggagtgctgttcctgcaagaagccaagggatactcggatgtggaggccatatccgtggtctcgataaacgccctgctgggaatactcggaaccgtgctctcgggatggttctcggacaaactcttcaagggagaccgaaagattcccgccctgctgttcggcatactgaactccctggccctggcactgttcctctacggaggaaatgccatgtgggtgaatgtcctctcgatggtcctgttcggaatagccatcggagtgctgatctgcttcctcggaggactcatggctgggggc

SEQ ID NO: 2296 - DNA, 960 bp, Unknown
  Unknown gut bacteria
ttcgacctgatgcgcctgttcggagcgtcgatggaggtcgatgccgacggacgctacatcccctatgtcgagacctatccttcgacggtcaacccgccgatcccgaaccgggaattcatggaaaagacgatcggcgacctggtgaaggcccgcgacctgctcaaaacgttcgacgttgaggtcaacccctcctacgccacgtccacggcctaccgcttcttcggttcgagcaaccccgcgcagggcaaattctacaacaaccgcggcacccggctgaactactacgccgtgacggtgctgctggcccgcgcctgcctctgggcccagaagaccgacgatgcgctgacctatgcgcaggagatcatcgacctggtgaccgccaagaccttgcagttctccacctcgggatcgatcctgagcgtccccaagatgttcgacgacctgctcttcggattctatcaggagaaactgacggaaacgttcgagccttacgtcaacaataccaactcgcgccggctgaccatcgacgacaagactttcttcaccacgccgacgaacgacaagcgttcgggtttcatcaagacctcgaccaatttcctcacgaaatacaccgtcaacgtctccgatgaaaaggacaagatcgtcccgaacatccgcatcagcgaggcttactacatcgccgccgaatgcctttacaagaccgacatgaagacggccgccgccgacctgatggtcgtgcgcaaggcccgcggctactcgtcgcccgtgctttcgggcacgatgaccgaagatgcgttctgggaggccctgacctacgaataccgcaaggagttcatcggcgaggggcagctcatcttcttctacaagcgcaccaaccgtccgatcaccttctccgaaggcaaattcgaccacaagggcaaactcaccctgccggttcccgacagcgaaagtgcgatctaa

SEQ ID NO: 2297 - DNA, 1407 bp, Unknown
  Unknown gut bacteria
atggctgctgctgagcactgcgcagcggccgccgctccggtttcggggcagacgaaggtgaagacctccgtcgaaaaggtcaccctcttcatcgacggggcgcaggtgacgcgcaccaagcagatcgacctgccggccggcaactcgacgctcgtattcacggggctctcgccctacctcgacgacaagagcatgcaggtcgccgccaaggggcgattcaccgtgacggccgtcaaccggctcttcaaccatacggacagtctcgaacgctcggcccggcaaaaggcgttggagcaggaactcgcccgaatccggctcgaacagcagcagcagaaagccgcacgcgaggtgatcgacgcggaaaccgatctgctgaaggtcaactgttcggtgggcaaccgcaatgcggcgacgccgctggcggccatcaaggagctcaacgaatattacgcctcccggatgcaggagctcaaacgccggacgctcgaactggacgggcggacgaaagcgctgggcgaacgcgaacggcaggtgctcgccgatctggcccagctgggcggcagacagtcggcgccgatgagcgaggtggaggtgcggatcgaggctccggcggcctgcaagggagccttcacgctgacctactacgtccgcaacgccgggtggttcccctcctacgacatccgctcgggcggattgtcggagcccgtggagatctcctacaaggccaatattttccagaacacccgggaggagtggaagaacgtcgggctgacgctctcttcgtcgaaccccacgacgggaaacatcgccccgcagctgaaaacctggtggctcgactacggaacgacgccgccccgctacgcctccgacctgacgggcaacaccgtgtcgggaacggtattcgacgaacagcgcgaaccgctcataggcgccagcgtcctcgttccgggcaccaccgtcgggacttcgaccgacgcgcaggggcgttattcggtcaccgtgcccgacggagcttcgagcctgcaattcaactacatcggctacaagtcccagacccgcgccatcgcgggcagcacgatgaacgtcgtgatgcaggaggataacgcacggttggacgaagtcgtcgtcacggcatacggaagcgcaccgtccgcggctctcagcggcaaggcggcaggagtgcgggtgcgcggcaaagcggccccggcgatggaagcggagttcatagagctcgccgaagagagcgaagcgatggaggtggagcagacccagactcagctgggctacgaattcgagatcagacagccctacaccatcccctccgacggcaagagcgtggcggccgagatcggacgctaccggctcccggcgacatacacctaccgatcgacgccgaagatcgacaag

SEQ ID NO: 2298 - DNA, 1173 bp, Unknown
  Unknown gut bacteria
acggacgtgatggatttccgccgaggatcgctttcgcccaggtacaaccatgaacttcaagagacgatcacgcttcccggcatcaccgacgactacaagatcgggtatgaatctccctaccggcatgtcgatcgcctgacgcgcgtctacgaatatatgggtccggcgtggtaccagcgcgacatcgagtttcccgccgactggaagggcaagcgcatcttcctctatttcgaacgtacgcactggctcagttcggtgtgggtggacaccaaggaggtgagccgcatcgactatatcagcgttccgcacaaccacgacctgaccgatttcgtcactccgggaaagacgcaccgtatcacggtgtgcatcgacaaccgcttccagtacaatacccacaagtgggaccacgcccatacggagttcacgcagatcaactggaacggcattctcggcgaaatgaaactggtggccgtggacccggtcttcgtcgaggacatgcagctttacccgcgcatttcggaccggagcgtcgaggtgcggatgacgatcgccaaccatacccggaagccgttcgaaggcaaggcgctgttcaccgtctcggggaacgggctcgaactgacccgggaagtgcccgtgagcggcgacggggagacggcagacctgacggaacgcattccgctggggcgggatgcgaaactgtgggacgaattcgatccgaatctctatacggtgacgtgccggctggcgacgaccgccggcggacgagcctgcgagcatgaaaaatcggctgtgttcggcttgcgcgaggtggctcagggccgcaaccatgtgctgctgaacggccgtccgatccacctgcggggtacggtcgagaacgccgttttcccgaaaacgggacacgcgccgctcgacgatgccgagtgggaacggatcatgcggatcgtcaaggagtacggcttgaaccacgtccgtttccattcgtggtgtcctccggccgccgctttccgcatggccgacaagtacggcgtctatttcgagatcgaaatgcccatgtggggcaaggatgccgagcccgacgaggcgcgctacgactttttccggcgtgaaatgcgggcgatcctccgcgaatacggcaaccatccgtcgttcgtgctctactgcaacggcaacgag

SEQ ID NO: 2299 - DNA, 783 bp, Unknown
  Unknown gut bacteria
atggaaccgctaccacccgaaaccggtttgcttctgaaactgaaacgccgcatcgcggagtatttcgagttccggcaggagaaagaacctgcgagggcttcggacatttacgattacgtaaagaacaagcctgaattccggcagtcgatccccgattcgaccgaattcagccgtttcctgcggaaaatgcacgactgcggcctgatgcggcagttcatcaaaaattacgaggttgacacctcctgccattcgaggtatcagtggagattctttcccgcagagaagagcgttcccgaaaagacgaccgaaaacgaccggaacgaagcgacctcgcatcccgacgccgcccccggattcctgccgcagaccaaatcgttcaaagcgtcgaacggcgtgacggtacgttcgaaggccgaactgtacattatgaaccggctgctggccgtccggcatttcgatgtctattacgaacgtccgctgaccgcccgggggcaaacccgataccccgatttcacgatccggaacaaacggacgaacacggtcttctactgggaacatttcggcatgacggacaatccgtcgtatgcggacggcatggccgagaaactcgcctggtaccggcaaatcagctacaaaagcatcgaggaaaacggacggctcatcgtaaccgtctatgagaacgccgcgcagttcatcgacgccgtggcacgcatgattcagcgcatggacgaaatcatcgcaccgtgcggttttctcagtccgtcggccaaagagagggaatga

SEQ ID NO: 2300 - DNA, 1494 bp, Unknown
  Unknown gut bacteria
atgaagcatatcttttacatattgttggttgtgctggcatacggcccggtccgggcgtatgccggaaaaaccggaaagacggtgagctatcttccggtgatcgggatgaaggatcaggaggtgcggaagaacggacgcagcgtggagctgacgatggtcgtcgatttgagcggtgcgcgtatccggacccagcatacggtgtcgctgacccctgtgctggtctcccgcgacggacggcgcgaggcggcgtttccgccggtcgtggtggacggcggcacgcgcagcaaggtctacctgcgcgcacagcgtctgaagagcgtggagctgccgccctgccatgacgggcgggcggaggtcgtcatccgccgcaggaacggcacggagcagacctacgactatgcggccgcgctgccttacgagcggtggatgctcgacggacgggtggagctgcgcgaggaggttcacggatgcgtgaactgcgcttccggcgagtcggagcaggagctcatgtcggacgtattgcccgggttcgtccccgaataccgtttcgcggcgattcttcccgagcccgaaccggtgaaagcccgtgccgaaacccgtaccgcccggctgcaattccgccaggacagctatacgatcctgccggagttcaggaacaaccgggccgagctggacacggtgtcgaactcgatcctgctcgtgaagcgaaacggcgacgtggagatcacgggaatctacatcaccggttatgcctcgcccgagggatcggaggcgcataacctcgtgctttcggagaaccgcgccaaggcgctcgccgggtatatccgccgtcacgacggcatcgcccccgaactgctgcatgtcgaatggcgcggcgaggactgggacgggttcgtcgaggcattggacgactatccgcagctgctggggctcgaccgcatccgcgaactgattgcgaaataccccggcaaccgggactattgcgagctggcattccgccggctggagcccccggcgatctaccggcggctgttgaacgaggtctatcccccgctgcggcgcaacgagtacaggatcgaatacaacgtgcgcaatttcgatctggaggaggcgcggcggatgatcggcgagcggcccgacctgctgagtctggaggagatgtacaaggtcgccgggtcctatgaaaagggatcggccgggtacgagcgggcgatggaaaccgccgcacgctgctaccccgatcggccggccgtgctgaacgaccgggcgctcgcggcgctcgggcggggcgatgccgccgctgcgataggcatgctggaggcgtgcggcttgtcggagaaacacccctcgctgctcaatacgctcggcgtggcctacgcccgcagcggcgaggtgcggaaggccgaggaggcgttccggcgcgccgcggggcaggggtcggacgaggcgcgtcacaatctggaacagctccggctggtcatcgaccagctgtga

SEQ ID NO: 2301 - DNA, 1338 bp, Unknown
  Unknown gut bacteria
gtgaaagagatggcaaagccaacagttgcaatagtaggaagaccaaatgttggaaaatcaactttttttaattatataataggaaaaaaattatctatagtagaagatactcctggggttacaagagatagagtttacgctgaagctgaatggagagataaacagtttacgttaattgatacaggaggaatagagccaaagtctaatgatataatattatctcaaatgagaaagcaagtagaaattgcaatagaagtagcagatgttataatatttttaacggatatgaagcaaggggttacaccagacgatttagacatagctctaatgttaaagaaatcacgtaaaccaattatacttgtatgtaataaagcagatagttttggaaaaatgcctaacgaaatttatgaattctataacttgggcttaggtgatccatatagagtttctgctgttaatgcattaggaattggagatgtattagatgcaatttacgaaaaattgccaaatgatataacagaaaatgatgatgaattaacaataaaagttgcaattataggtagacccaatgtgggcaaatcttcattggttaataagatattaggtgaaaatagagtaattgtaagtgacatagcaggtactactagagatgctactgattcggaatttgaaaatgaatttggaaaatacgtatttattgatacagcgggtataagaaaaaagagcaaagtaaatgaaaatatagaaaaatacagtgtaattagaagtttgttggcagttgagcgtgcagatgtctgcatattaatgttagatgcaatagaaggagtgacagaccaagatgcaaagattgcaggtgaagcacatgaagctggcaagggcataataattgttgtaaataaatgggatgaatatgaaaaggaaaatggaactttagaaaaatacaaaaaagatgtatataacaaattatcatatttgcaatatgctccaatactatttatttcagctaaaacaggacaaagagtacataaactatatgaacttattaatagtgtagcaagccaaaacgccttgagagttcagacatctgtgctaaatcaggtattgaatgaagcaatttcaatagtgcaaccacctacagataaaggaaaaaggctaaaaatattttatatgacacaagcttcaacaaagccaccaacatttgtagtatttgtaaatgacaaagaactattccacttttcttatgaaagatatctaataaatcaattaagaaaagaatttggtttagtgggaacaccagtaagaataatagtaagagaaaaaaatgaaaaagatttataa

SEQ ID NO: 2302 - DNA, 582 bp, Unknown
  Unknown gut bacteria
atgaataatttaattgagattagatggcatggtagaggtggccaaggtgctaaaacagcttctcttttgttagcagatgctgcttttaatactggcaaatatattcaaggttttcctgaatatggtcctgaaagaatgggtgctcctattactgcatataacagaataagtaactctcctataacaatacatagtaatatttatgaacctgattatgttgttgtagttgatgatacattacttgaaagtgtagaagttacagatgggctaaaagaagatggtgcaataattattaatacaactaaaaattatgactatctaaaaaatgttttgaatggatacaatggaaaagtttatacaattgatgctagagaaatatctatggaggctcttggaaaatattttccaaatactcctatgcttgctgcagttgtaaaagtaactggaattatgacagatgaagaatttttaaatgatatgcaaggatcttttaagcataaatttgcaaaaaaacctgaagtcatagatggcaatatgaaagctttacaacttgcattaaatcaagtaaatttaatctcataa

SEQ ID NO: 2303 - DNA, 1269 bp, Unknown
  Unknown gut bacteria
gtgaataaaatgtctagttacataatagaaggaggcagaagattagagggtgaagtagaagtatcaggttcaaaaaatgcatcattaccaatattagcagcaacaatattaaataaaggaaatacaaagttatacaatgtacctaatatacatgatacaaaaataacacaagaaattttaaaatatttgggttgtaaaattaagaagaataatggtaaaatagagataaactctaagaagataatcaaaagagaaattccagaacaactaatgaggcaaatgaggtcaacagtaatattggccggagctatattaggaagatttaaagaagtaactttctcatatccaggtggatgtgatattggaacaagacctatagatttacatttagcggcttttaaaaaattgggagtaaatatttcagaagatagtggatttattacatgtaaatgtgataaaataataggcacaaatatagacttagatttcccaagcgttggtgcaaccgaaaatataatacttgcaagtgtttacgcagatggtataactaagatttctaatgctgctatggaaccagaaatagtggatttagcaaaatttttaaataaaatgggtgctaaaatagaaggagcaggcacaaacataattaaaataacaggtgtagaaaaattaaaggatgtgtcatattccataatgccagatagaatagaggcaggcacgctattatgtgcagttgctataactggtggaaaagttaaactaaataaagtaattccagaacatataaatcaaattttaaacaaactagaacaaacaggttgtgaaataaagatagagaataaatgtgtttgtttaaaggcacctaaaaaaatcaaagctgttgatataaaaacaatgccatatccgggttttccgacagatatgcaatctgtttttgcaagtatactaacaattgcaaagggaaattctgttatagtggaaaatatatttgaaaatagatacaaatatgtaagtgagttaaaacgaatgggggccaagataacagtagaaggaagaattgctgtaataaagggatgcaaaaaattatcaggagctactgtagaaagcacagatttaagaggtggagcagcattagttgtagcaggtctagttgcaaaaggaacgacaacagttaataaaataggatatattttaagaggatatgaaggcttggataaaaaattgaacaagttaggtgcaaaaataacaataaaagaagaaaaggaatag

SEQ ID NO: 2304 - DNA, 309 bp, Unknown
  Unknown gut bacteria
atgggtagaaaattttttgaaatagatgaagaatttatatgcgaaaattgtggcaaaaaaatagaaccattaggttattcgtgcaggaatcattgcaattattgtttacattcaaaacatgtggatataaatccgggagatagagccgaaacatgccatggagtattagaaccaataagagtagagctagattcaaaaaaaggatatataataatatttagatgtaaaaaatgtggagcaatacgtagaaacaaagcagcaaaagacgataatatagatttattaattaaattaacggcttcacaataa

SEQ ID NO: 2305 - DNA, 696 bp, Unknown
  Unknown gut bacteria
atgattaaaattggatttgtgggagcttatgacaaaacagatattatattatatatagctaaaattatatctttaatagggaaaaaagttttagtcattgattctacaattaatcagaaggctaaatatgtagtacctgttataaacccaactaaatcatatataacagagtttgaaggaatggatattgctgtaggatttaataacttacagcaaatccaagagtatttgggaacagaagataaaaaaatagattatgatatagttttaatagatatagattcaacagaagcaataaatatatatggaatgaaagaagcaaataagaactattttgttacttcttttgatttatactctttaaaaagaggaatagagattttagatggattaaatgaaaccgtaaaattaaaaaaggttctattttctaaatatgcatctagcgaagaggatgattatttgaattttctatcactagggcataaaatagtatgggaatcagaaagaatatattttccatttgaattaggagaccaaagtgtaataatagaaaatcaaattatatcaaaaattaaagtaaaaagattaagtaatcaatttagagaaagtttattgtatatggcggaagaaattgttgcgccagaagataaaggaaaagtaaaaaaagcttttaaacaattggaaaaagaggtgtag

SEQ ID NO: 2306 - DNA, 1194 bp, Unknown
  Unknown gut bacteria
atgaaaatcttagtagtaaattgtgggagttcatcattaaaatatcaattaattgatatggaaacagaagaagttatggcaaagggatatttagagagaataggattaggaggatcttttttaacacatacagtaaatggagaaaaacacagaatagaaaaagaaatagcaaaccatgaagaagcaatgaatttacttttggaacaattattagataaagaatatggagttatttctgatctaaaagaaataaatgcagttggacatagagttgttcatggaggagagaaatttagtggttctgttgttataacagatgaggttattaatgctatcaaagagtgcattcctttagctccactacataatcctgctggaataacaggaatagaagcttgcaaaaaagcattaccaaatgttccaatggtaggtgtatttgatacagcatttcatcaaacattagatcctaaagcatatatgtatgcaataccatatgaatattatgagaaatataaaattcgtaaatatggattccatggaacctctcatagatttgtatctaatagagtcgcagaaatagtaaacaaaccaatagaagatttaaaaataattacttgtcaccttggacaaggagcaagcctttgtgcagtaaaaaatggaaaatctgtagatacttcaatgggattaacacctttagcaggtgtaccaatggggtcacgttctggagacatagatccatcaatagtaacatttctaatggaaaaagaaggattatcagctaaagaaatggataatatattaaataaaaaatctggaaaattaggattgtctggaataagtgccgacgatagagatatagaaaaagaaatactaaatggaaataaaagagcagaacttgcaatagataattttatctaccaagttgtaggatatataggaagatttgctgctcaaatgaatggcgttgatgtaataacatttgcaggaggagttggagaaaacggaatagatgtaagagaaaaggtttgtgcttatctggaattcttaggagtcaaaataaatacagaagctaacaactgtagaggaaaagaagtagaaatctctacaccggattctaaagtgaaagtatttgttatacctacaaacgaagaattaatgattgcgagagatacaaaggaacttgttacaaaataa

SEQ ID NO: 2307 - DNA, 1365 bp, Unknown
  Unknown gut bacteria
atgagaaaatattttggaacagatggaataagaagaatcgctaatactgaactctctccagaattagtttataaagttgcaaaagctggtgcatatgttttatctaaacatacagaccatacaccaacaatattaataggtagagatacaagaatatctggtactcttatagaaagtgcaatggttgcaggcttcttaagctatggagctaatgtaaaaatattaggtgttatgccaaccccaggagtggcatatttgactaaaaaacttaaagcagatgcaagtgttgtgatttctgcatctcataatacatatgaatttaatggtgttaaatactttagtaataaaggaatgaaaattccagatacaattgaagaagaaatagaagaaataatggactcagataaattaacagactttacagctgtaaatgataaaataggcgtttcagaaataagaacagatttattagatgaatatgtatatttctttaggaaaaattttgaagaagactttgaaaattatgaaaaagaaaattttgtagttgccatagatactgcaaatggtgctacatctgttgttgcagaaaaagtatttgccgctctaggaataaaacactatatattaaataatacaccaaatggaataaatataaatgataattgtggctctacacatttagatgtactaaaaaaatatgttgtagaaaataaatgtaacttaggaattgcttatgacggagatggagacagatgcttagcagttgatgaaaatggagaagaaatagatggcgacagactaatagctattatttctaagtatctaaaagaaaaaggaaagcttgctaataatgcaatagtagcaactgttatgagtaacttgggcttaaaaaaatatgctgaagaaaatggaataacaataaaacaaacaaaagttggggacagatatgttctagaagaaatgttgaaaaatggatataatataggtggagaacagtcaggacacgttattttattagattataacccaacaggagatggaatattaacatcattaatgctaattagagtaatgttagaaagtaataaatcagcatcagaattgtgtaaaattattaaaatgtatcctcaagtattagtaaatgctaagattgatcctaaaaagaaaaaagactatgaaacagatgatgagattcaaacagaaattagaaaattagaagaggaattttctggaaatggaagagtattaattagaccttctggaacagaaccactaataagagtaatgttagagggagaagacaaagcatatttaaaagaaaaagcagaaaaccttgcacaattgattgaaaaaaaattaaaataa

SEQ ID NO: 2308 - DNA, 1314 bp, Unknown
  Unknown gut bacteria
atgcaaaatcaagtagaactgcaacaaaatttgacaaatcaaattgaaaatttaaaatctatttcggctgtgagcttgggcacattttttattattatattaataatgggaatttttatttctaaatctataacaaagccaataacaaaattgataaaaagtgtagaaaaaataacagctggcgaagatgtaaaattagaaagtgaaaatggaacagatacccaaattggagaactagttaatgcatttacattaatgacaaatgaattaaaacaaaatataaatgaaatagaaaggcaaaaaaaacaaatagaaactatattgttgcatatgacagatggagtaattgcatttaatatggaaggaaaaataatacatattaacacagcagcaatgaatttattaaaattagagcaaaaagacaattcatttgaaaagatatttaataaacttaaacttaatataaacttagaaaaaataatatatctggaaaattggacttcatcagaacatagattaacaatagaagataaatgtgtaaatctattttttgtgccatttcaagacgagaataataggcaagcagggttaattgtggttatacaggatattacagagcatgttaaactagataatatgagaaaagaatttgtagcagatgtatctcatgaattaaaaacgccaattacatctattatggggtatgcggatactttattggagggagaatatgacaaagatacacaacaaaaattcttaggtgtaataagttcagaagcaagaagaatggcaagacttgttacagacttgctaactctttctaaatatgatagcaaaaaagttaaattagaagaaactgaatttgatttaggagaactaacaaaaaaatgtcaagaaagattaaaatttgaaatagagaaaaaacatcaaaatgtagaatgttttgtaactgcaaatgtgccaccagttagtgcagataaatatggaatagaaagagtggttttaaatatattatctaatgcaataaaatatactcctgaaaatggtaaaattaaaatttatgttggatttgtgtataatgatgcatatataaaaataattgataatggtattggaatttcggagcaagatttaactagaatatttgacaggttttatagggcagataaggcaagaacaagagaaatgggaggaactggacttggattatcaattgcaaaagaaatattggatcaaaataaaggaagtatagatattagaagtgaattaggaaaaggaacagaagttataataagaataccagcgaaaaagtaa

SEQ ID NO: 2309 - DNA, 1251 bp, Unknown
  Unknown gut bacteria
atgaataatataacagcattaataatggcagcaggtacagatgataaaatgaaatctaaaaaatcaaagttagcacaaactatatatggaaaagaagtaataaaaagagttgttaattcagtaaaaaaagctggtatagaagaggttggtgtaatagtaggagaaaataaagaagaaatagaatcaatattaaaagatgaagtaaaatacatatatcaagaacaatgtttaggaacaggtcatgcaataatgcaagcaataccatatttagaagaaaaatcgggtagagttttaatattaaatggaaatatcccattaattacagagcaaactatacaaaaaattgtggataaatctataaaagaagatgaagtagctacaatactaacaggcattataagtgaaccaaagggatatggcagagtaataagaaaagaaaataaaatatatgaagtaatagaagaaacggatttggaagaggtacaaaaaggtatattagaagttaatgcaggagtgtattgctttaaaataaatgaattattagaaatattaggaaaattgcaaaaaagtagcatgggcttatattatattactgatgttataaaaatgatgaacacaaaaggactaaaaactggaggagtattagtagaggataatacagaaattttaagtttgcatacaaaattacaattagagatgttaaccagaatactaaaaataagaattaacacaatgcacatgaataatggtgtaacaatagaagatatgaatactacatatatatatgatgatgtagaaataggaatggatacaataatacacccaaacactactataaaatcaggagttacaataggggagaactgcgacataggacctaatgcatatataagagaaggatgtaaattggcaaacaaagtaaaaataggaagctttgttgaaataaaaaaagcaataatagcagaaggcaccaaagttccacatttatcatatatgggagattgcgaaataggcacaaaatgtaatataggatgtggtacaattacttgtaactatgacggggtaaacaaacataaaacaataattggagataacagttttataggctctaatgtaaactttgttgcgccagtcaaagtgggaagtaatgtagtgataggagcaggttcaacaattacacaagatgttccagacaatgcattgggaattgcaagagaaagacaaacaaataaagaaaattggaaaaaatag

SEQ ID NO: 2310 - DNA, 1425 bp, Unknown
  Unknown gut bacteria
ttgtatctaaaacaagaaggaatgaggaaaaacatgaaaaaaaatctaaatttttatataacattatggattgtaaaattaatttcaaccggattaaaactgttaggcaaaaatgcaacatattatccagggaaattagcattagatatgtgcccaggttttatgggaatgttagataaaccaaaaaccataattggtgtaacaggaacaaatggcaaaacaacagtatcaaatatgattaatgatatattaatagataatggatataaaataataaacaataaatatggctctaatatagatgcaggaatagccactacattgctacaaggagcaacactatttggaaaaagcaaaaaagaaattgccgttttagaaatagatgaaagaagtgcaccaaaagtatttccatatataactccaacatatttaatatgtacaaatatatttagagattcattaatgagaaacgcacatacggaattcatatcagaaatagtatcaaaaaatgttccaaaagatacaattgtaatagaaaatgcagatgatttaatatgtagtggtatagcaccaaataatgcaaaaatatattttagtatagataaattagatacagatacaaaagaaccacataacattgtaagagatattattacatgtcctgtatgtaatacaaaattggaatatgaatattaccgttaccatcatattggaaaagcacattgtcccaaatgtgggtttggtacacctaaagcagattacattgcaaataatatagatattaataaccaaaaaatgtgtataaaaactccaacaggtgagcaagagtttaaacttattacagacaatattataaacatatataatatgcttgcagtgataacagttttagagcaaatgggattaacagaagatcaaataaacaattcatttgcaaagctaaaaatagtagaaacaagatttagtgaagaaaatgtcgatggaataagaattgtaacacatctagcaaaaggaataaatccaattgcatgttcaagagcatttgaatatgcaaagaacgcggatggaaacaaagcagtaatagtaatagtggatgacttacatgaagaggcaaagggctcagaaaatacatcttggcaatatgacacagattatgagtttttaaatgatgaaagtataaaacaagtaataatagcaggaccaagatatttagacggtaaagtaagactattaatggctggggttccagatgagaaaatatcttgtagaaaagatatattagaagcaacaaatgaactaagacttgatggaatagatggggtatttatcttacacgatttatattctataaaagaaacaaaagaaataaaacaaaaagtagagggaatgataaagggaaggaatgaaataaaagatgaaaattga

SEQ ID NO: 2311 - DNA, 858 bp, Unknown
  Unknown gut bacteria
atggatggaattattataataaacaaggaaaaaggttatacatcacatgatgcagtatacaaaataaaaaaaatgtttaatacgaaagtaggacacactggtacattagaccctaatgctactggtgttcttcctattttattgggaaaaggaacaaagctttctaaatatttaatagaacatgacaaagagtatgaggtattattacaattaggaacaaaaacaacaacagctgatgaagaaggagaagaagttgaaaaaaagtgtgttccagaacaatacttgcaatttaaaaatatagaaaaaatattaaaaagctttattggtgaaagtcaacaagttccaccaatgtattcagcaattaaggtaaatggaaaaaaattatatgagtatgcaagaaaaggacaacaagttgaaataaagccacgaaatatagaaatatatgatattgaattaataaaggtaaataaagaagaaaaacaaatgcaatttaaagtaagatgttctaaaggtacatatataagaacattgtgtgaaaatatagcagaagaaatgcaaacagtaggatatatgaaagaattaaaaagaaccaaggtgggaaaatttactattgaacaagcaattacaatagaacaattaaaggaaggacaaaatataaaagtgataacaattgaagagatgtttgaagataaagaaaaaatacagttagaagacgatgatatcaaactactgttaaatggtgtaaaattaaaaaaagaaaaacaagatggaatatataaaatatattctaaaacaaataaatttataggtacaggcataattgaaaatggaagacttaaagtagatataagaatataa

SEQ ID NO: 2312 - DNA, 798 bp, Unknown
  Unknown gut bacteria
atgtttaaattttgtagtttgtatagtggcagtacaggaaatagtttatttgtagaaacgcctaatacaaaaattttaatagatgctggagaaagtgcaaaaaaaattgtttctgcactttctaatatttgtgttgatattgaaaatattgacgctattttagttacacatgagcattccgatcatgtaaaaggtcttggcacactttcaaaaaagtataacatcccagtttatgcaaacaatggcacttggcaagcaatgccagttcaaagttctaaaatagaaaatagtaataaaagattgtttaattctaacaaattattttcagttggagaattaaaaatttttcctttttcaattcctcatgacgctgcagaaccttgtggatttaatatttattataacaataacaaaattagtattgctacagatttggggcatattgattccaatataattagtaaattagaaaatagttcttttatattattagaatcaaattacgatccagaaatattaaaatgttcatcatatccttacaatttaaagcagagaatatctggtccatatggccatttatctaatatcttggctggccaaaccatatcatatttagcacaaaacggcttaaaaagtgtaatgcttggtcatttaagtaaggaaaataattttcctgagcttgcatataaaactgtaatgaatgaattaattgaaagtaacaaggattttgactattcttcttttaatttgagtatagctaaaagatatgaacctagccccattattaaattagcttaa

SEQ ID NO: 2313 - DNA, 816 bp, Unknown
  Unknown gut bacteria
atgaaaaaacaagaggtatttatttttatggagaataaaatgaaattattattagtggaagatgatgttaatacttgtgaaatatttaagaaaattgaaagagcaaaaagtgagataaaatttattgcaataacaaactcggaagtagaagcgttaaactgtgtaaaaaataatatgccagacggtattatattagatctagaattaacaaatggaaaaggtagtggatttggatttctaaaagagttaaggaaaattaagttaaaaatattgcctaaaataatagtaactacaaacatatgtacagactctgtttatgattatttacatgataataaagttgattttatattttataaaaaacaggaaggttattcagaagaaaacgtaataaatacattactattgctaaatggttatacagataatataagctacaccgaaaatactaaacacaatgaatcaaatgatgataaagaaatattggaagaaattgacaaagaacttgatttgataggagtaggaactcatttacaaggcagaaagtatttacatgactctatatattatgcaataatgcaagaaaataatgaaagcaaaatatcaataatacaatatttaggtggtaaatataaaaggtctacaagtactataagcagagcaatgcagaatgcaatactttatgcttggcgaatatctgcaatagaagatttaaccacatattacacagcaaaaattaattatgaaacaggagtaccaacaccaactgaatttatatattattatgccaataaaataaagaaaaagatgatctaa

SEQ ID NO: 2314 - DNA, 531 bp, Unknown
  Unknown gut bacteria
atggaggtgttttatataaagcaagaattacctgttaacgaacaaattagagcaaaagaagttcaagttatagacgaaaacggagagaaaaaaggcgtaatgaatattaatgatgcattagatttagcatttgataaaaaactagatttagtattggtatcgcctaatttagaagttccagtttgtaaaataatgaattatggaaaatacaagtttgaacagtctaaaaaagaaaaagaagcaaagaaaaaacaaaaagttacagagctaaaagaaataagaattactccaaacatagaacaacatgactttgattttaaagcaaaaaacataaggaagtttatagaggacggaaataaagtaaaagtaacagttagatttagaggaagagaattaaactatgttaaattgggagaagaagctttaaacaaatttattgataatttgtcagatattgctacacctgataaaaaagcaatattagaaggtaaaaatatgtttattatattatctaaaaaaacagataaataa

SEQ ID NO: 2315 - DNA, 327 bp, Unknown
  Unknown gut bacteria
atgctattacaaatatatggtgcaatgcttacggaaaaacaatatggacttttagatgattattacaataacgatttgtcactttcggaaattgctgaaaactatgatataacaaggcaggcagtaagagacattataaaaaagggggaaaataaacttttcgaattggaagaaaagctttcggttatggatagaatgttaaaacaagataagaagattcaacagattttagaagagctttgtaaaatacaaaatagttcatctgataaaaaaattgagaaaattcttaataatgttacaaaagaattaagtttaatgcgaatataa

SEQ ID NO: 2316 - DNA, 306 bp, Unknown
  Unknown gut bacteria
atgctacaagatgcatgtaataattgtggtgtagtagcagattattacaacgagaataataaaaattcttcttgcgattgtggatttgaagaaagtgaaaacgtttttccaactaatccaatgtttggtcaaagctatgttccaattcagacaatgaacaaaacatttaccccttgtgttggattaaaaatgggaacaatatttccagagttagttagcccatatgtaccatgtcaatctatagaagaaaatgcttttataaaagctatgaatacggttggagaggggtgtaataaatgttactag

SEQ ID NO: 2317 - DNA, 1083 bp, Unknown
  Unknown gut bacteria
atggaagaaagaaaaaaaagtagtaatggaattaggatattaatagttttgttaatactattaatgatagtagcaggagtattagtagcaataaaatttatacagggtaacaaaattaaacaaactcaaacaagtgcgggagtagaagaaaacaaagagccagaaaaagaagtaataaaattaccaacaacttttgctggaaaagatagaccaattgctgtaatgatagataataatataaatgcaatgccacaggcaggattactagaagcggatttggtttatgaaataatagttgaaggaggagaaacaagaatgatggcagtcctaaaaggaaaagatgttgaaaaaataggacctgttagaagttcaagacactattttctagactatgcattagaaaatgatgcaatatatgttcattttggttggagtccacaagcagaaagtgatatatctacaatgggagtaaataacataaatggactatattatgatggctcatatttttggagagtaagcgaaaaatatgcaccacataatgcggtaataagtacaaaaaatatattaaaagttgcagaaaacaatgaatatagaacaacatcagaacaaaaacctgtgttgaattatgtagcagatgaaattgaactagaagatggcaaagaagctgaaacaattacaattccatattcagattataatactgtaaaatacacatataatgaagataaaaaagaatatgttagatattcaagaggaaaaaaacaagtagattggaatacagacacaacaataacaacaaaaaatataatagtaacatttgcagaaaactatagtttaaatgatggttcaggcaaaggcagacaaggacttgaaaatataggaaagttaaaaggatattatattacaaatggaaaagcaatagaaataacatgtgaaaaaatctcaagaacaacgcaaaccgtatacaaagatttacaaggtaacgaaataaaagtaaatgatggtaaaacatttatacaaatttgcccattaaatgcaaatgtaaagatagaaggaaatactaaaacaacagaaaaataa

SEQ ID NO: 2318 - DNA, 954 bp, Unknown
  Unknown gut bacteria
atgaaaacgaacaaactaaaaatgataatgactatattttttacaatttttatattatgcatattatcattaacagttaacgcaacaaatgaagaaatagaaatattagaaaaattagaggaaggagaaaaaaaatatattatttatatttcgacagattcagaatttgaattcgccttttcagataactcagcaacagaaatagatgacttagtatttttaccatcggtaacagacacaaatggaaataacgtagcttatatagactcaacaatgtcagcaacaacatatttatgggtaaaaaatacaacaaacaatactatgcttataaaaggattaaaagtagatttaacagacactgttacagatagtattgttgacgaaatagctgatataacaaaaagaattaaagttgacatgactaaaaagaataaggaagaaaaagaaattgacggcgtaaaaactacaataacaacaggcaaagtagaaataacagataatgagaattcagtatataaatatcaattaattaaagttacagacagcaacaaagattttgaaactttaattgaaaatatgaataaagcaaccaatatgtttgaaaaattgaaagcatataaacacttttataatagatatcatgagctagtgccttcaccacgtgatttagcatggcaagaagtaaaaaacatgactataccacaaccagaaacgtcagaaaatggagacaaatatattttatggttaatgcaagatggcgatattatagatttgcaaatattaacttgtactagagcagaagatggtggagaagaaatagaaactgttatagtaaaagaaacatctaaattaccttttacatatgatagtatgattttatttatagtattaggagtattaatagtattagcaatagtgttattaatagttaaaaataaaaaaaatgaaaaatag

SEQ ID NO: 2319 - DNA, 699 bp, Unknown
  Unknown gut bacteria
atgtcaaaggaaaaaatcaaattaaactcagaaaaaataagcaaaagagaaagcagaataaaagttttaaaactaggtttattaataagtactgtatttttaatagtaatatttttcttattaaaagtagtatatggacaaggaccatttacaatatcattagaccaaaactttgctaaaaaaagtggtatagtaatatatgataattcaacagtaaaagaatttagaagaatattagaggctggcaaactagagttcatggacaatatatctataagatggataccagataatatagatacagaagcagagggagctcacaatggaaataattacattgcatatacattttttatagaaaacaatggaaacgagaatttaacatattgggcagaattagtaatagatgatgtaattagagatgcagacgaagctgtaagaataatggtatttagaaatggagaaaagaagatttatgcaaaaagaaattcaaatggagagccagagccagatacaataccattttattcagatcaatatgtatacatagaaccaagagaaaatttttatccaaacgatgtagatagatatacaatagtagtatgggtagaaggagacgacccagactgtataaatgatataataggtggagaaatgaaaatgcacttagaaataaacgaagaacacgtgcaaaaataa

SEQ ID NO: 2320 - DNA, 699 bp, Unknown
  Unknown gut bacteria
atgaatatcaaagaaatcccccaatcagaaagaccttatgaaaaattggagatgtatggtgcacaagcactttcaaatgcagaattattggcaataataatcaaaagtggaacaaaggaagaaagtagcatagtgctagcacaaaaaatactatctatgcaaaaaaatacacaagacagtttgagatttttacaagacatatctataaaagaatttatgagtataaagggaattggtaaagtaaaggcaatacagctattagcagtgtgtgaattaactaaaagaatatcaagaccaattaataactttaatatacaaataaaatctccccaagatgtagcaaatttactaataaatgaattgaaatatgaaaaaagagaaatagtaaaggtactaatgctaaattctaaaaataatgttttaaaaatacaagatgtggcatatggtggtacaagctttgctgtttttgaaataaaagatgtgttaaaagaggcaataaaaataggtgcacctaaaataattttagtacataatcatccaagtggagacccaacaccaagcgatgaggatatagaacttactaaaaggctgattcaagtaacaaaaatgctagaaatagaaatgatagaccatgtagtattaggagatggaaaatataaaagtatagtttctatgcttactaatggtaaaattggataa

SEQ ID NO: 2321 - DNA, 888 bp, Unknown
  Unknown gut bacteria
ttgggtcaagtcggagtgggagagattatgaaagaattagttgttgaaaataagtataattgtaaaaaattagttccttttttgttagataattttgatggtttatgtactaacaccatatataaagctttacgaaaaaaagatattcgtattaatgatataaaagtaaactctaatgtatttttacagactggtgattctgttaaaatattcatttctgatgaatttctttttaagcaaaatcattgtaatttcaacaaagtatatgaagatgataatattctaattatagataaacctgccgaaatagaagttactggctctgattctataacttctattttaaaaaggcagtatgcctatattgaaccttgtcataggttagatagaaatactactggtttattaatcttcgctaaaaacaaagatgctttagatattttattacagaaatttaaaaatagagagattgaaaagcattataaagcaatggtatatggaatacctaatattaaaagtcaaacattagaggcttacctgtttaaagataataaaaaagctctagtatacatttctgacacccctcaaaaaggatatgtaaaaatagtaacgtcttataaagtattggaaaaaaatattgaaaaaaattattgtattttagacatacaattgcatactgggaaaacacaccaaatacgtgcacatttagctcatattggttatcccataattggagatggaaaatatggaataaacaaaattaacaagcagtttggatataaaacacaacagctttgcagtagttatattaaatttaattttaaaacagatgctaaaattctaaactacctaagtaataaagatgtgtcacttttggaccgtacctaa

SEQ ID NO: 2322 - DNA, 933 bp, Unknown
  Unknown gut bacteria
tttttttttgatatagtatatagtaaattaatgtgttattcggaggaagaaatgccaagagttgcaaaagataaagttgaaaaagatataattgaaaatgtaaaaacagtaggagaagcgcctaaatctagtaatagaactaaaaaaagtgcttctgttaaagctgtggaaaaagataataatcctaaaaaaactaaaaataaatctacgtcagatgttgctaaaaaaggttcttcctcaaaggaaactaaaactactaaaaaagctactgataaaaaaaattctgccagaaggtcttctacttcttctaaaaccactagaaagaaaaaagatactactaaacctgatataatagaatattatgatttaccttttagatataatcaaactactgtaaaggttcttgcccaaacaccaacaaatctttttatatattgggatatttctgatgcagatagaaacaagcttattgatacttatggaaattattttttcgagaacactaaacctgttttaattattacaaatgaaactatgaattatacttttgaaattgatataaatgattttgcaaatagttggtatttgcatgtaaaaaatagtaattgtaaatataaggttgaacttgggagacgacctataacccacgaaattgtaattcctaataattatgtatatattagttcttctaacgctatggatgctccaaatgaccatatattatttgatgaattacagcaaaatgtattttttaagaatgttaaaaccaatgttgttactgagaaaaacattttgactatatctcacttaataaatatgggaaaaatatataatatatatgagttatataagaaaatgtataaagatgaatttaattgtgatgattttggtacaaacctatcttcttcacaaagttcaagtagttttatttaa

SEQ ID NO: 2323 - DNA, 570 bp, Unknown
  Unknown gut bacteria
ttggaaaaaacaatatggaagtcaggtacttttatttatccactgccagtagtaatggtatcatgtggaaacatggaaaaaagcaatattataactgttgcttggacaggaattatgaatactaatccagctatgtgttatatatcagttagaccagaaagatattcgtataatttaattaaagaaattggagagtttgcaattaatttaacaactcaagatttagtatatgcaacagattggtgtggagtcaaaacaggtgctaaagtggataaattcaaggaaatgaaacttacaaaacaaaaagcggaaaatattaaatgccctttaatagcagaaagccctatttcaattgaatgtaaagtaaaagagataaaagaattgggaagtcaccatatgtttatagcagatgtactttcaatagatgttgcagaaaaatatattgatagtgatggagcatttgatatatcaaaatgtgggctaatagcatatgcaaatggtggatattataatttggataaaaaaataggcaaatttggctattcagttcaaaaaaacttgaaaaaataa

SEQ ID NO: 2324 - DNA, 1005 bp, Unknown
  Unknown gut bacteria
atggaagaagaaaggttaattaatccagaacttgaaagtagcaacgaagaaagattagaaaattctttaagaccaaaacttttagatgaatatataggacaagataaggtaaaggaaaatatgaaaatatatatagaggctgcccaaaaaagaggggagcctttagaccatgttttactatatggacctcctggtttgggtaaaaccacacttgctaatattatatcaaatgaaatgaaatcaaatataaaaataacatcaggtcctgcaatagaaaaaccgggggatttagcagctttacttactaacttatctgaatttgatgttttatttatagatgaaatacacagattaaacaaaagtgtagaagaaattttgtatcctgcgttagaggattatacacttgatataataataggaaaaggaccaagtgcaagatcaataagattagatttgcctaaatttactttaataggagcaactacaaaagcggggtctttaaccactcctctaagagatagatttggtattgttcatagattagaattatataatacgcaagacttaacaacaatagtaaaaaggtcggcgaagatattaaatgttgaaattgatgagaactcagcaatagagattgcaagacgttctagaggaacaccaagaattgcaaatagattattaaaaagggtaagagattatgcggcagttctgggggatggaaatattacattaaaaataacaaaaacagctttaaataaattagaaatagatgagtatggattagacgaaatcgatagaagattgttagaagcaatgattattaaatatggtggaagaccagtaggtttagaaacaatggcagttactgtaggggaagaagctgacacaatagaagatgtgtatgagccttatttaattcagatagggtttattacaagaacaccaaggggaaggataccacttaaaccagcatatgaacacataggggtagaatataatgaataa

SEQ ID NO: 2325 - DNA, 471 bp, Unknown
  Unknown gut bacteria
atgacaaggaggttttttatggcaaaaaaagttgttgcaactaatcctactgccaaacataattattcaattgaaaaaactttagaagctggtattgttttaactggaacagaaataaagtctatacgcaatggcaaaattaatatgaaagatagttatgctattataaaaaatggtgaagttcttgtttatggaatgcatattagcccatatgaacatggcaatatttttaataaagatcctttaagagttaaaaaattattactacataaattggaaatagcaaaacttattggtcaaactaaacaaaaaggttattctcttattccaatggatttatacttttccggtaatttcttaaaaataactttgggaatcggtaaaggaaaaaagttatatgataaaagagaagatattgctaaaaaagatgctgaaatgagaataaagaaggaatttggtaaaaaaatatag

SEQ ID NO: 2326 - DNA, 846 bp, Unknown
  Unknown gut bacteria
atggtaacaaaacatataaaatatttacttgtagaaggatacccagatataaaattattaggaaggtggtatagacaaatgaaaatattaacagtaggagatttagtaggagaatgtgggcttaatatattaaagcaaactttacctaaaattagaaaggaaaaaaacatagactttgttatagttaatgcagagaatgttgcctcaggaatgggaataacctctaaagattttaatgaattattaaaactaaaagttgatgtaattacaatgggaaatcatacttgggcgaaaaaggatatatttacttttatagataatcctaaactattaagaccagccaattattcaaaaggtgtggttggtaaaggaattaatatatatgaatgcaaaaacaaaaaaattgcagtaatgaacttaataggaagaacagatatgcacgttctttctgagaacccatttactgtagcacaagaattattagatgaagtaaaagcagatattaaaattatagattttcatgcagaagcaacagctgaaaaaatagctatgaaatactttattgatggaacagcaacagtattatttggaacacatacacatgttcaaacagcagatgagaatattacaaataaagggatgggatatataacagatttaggaatgaccggcccaaaagaatctgtaataggaatggaaaaagaagcatctataaaaagatttttaacatctcttccagaaaagtataaggtagctgaaggcgaaagcatatttaatgcatgtatttttgaaattaatgaagataattgtcgaactgtaaaaattgaaagaataaatatgaaataa

SEQ ID NO: 2327 - DNA, 462 bp, Unknown
  Unknown gut bacteria
ttgtttagttggtttaatatatacggagtttctccaaatttgtttataattttagtattaattatagggctctttattggaaaaaaagttggattagctttaggaattgtactgggattatatatagatgttgtaaatggaaaaatatttggacaagtagccttaatgcttggaatagtagggttactaggagaatatttagataaaagtttttcaaaagaaagcagaattacattaatgcttatggtggcaagtacaacaataatatatgaagtagggatatatataataaacattataaaattaaatgcaagtatagagttagcattatttttaaaaatactagcaatagaaacaatatataatacaattattacaattataatgtacccaataatacagagactaggagaaaaactagaaagtacgtttaaaccgcaaacaagaggaatgtatttttaa

SEQ ID NO: 2328 - DNA, 153 bp, Unknown
  Unknown gut bacteria
atgttggtcctaaaaatgtctatggtgttaccggaaatacatataaagatgagaaccggtaatcccacaaacggagcaactaccggtcctcatcttcatttaggtgttagatacaatgatgaatatataaaccctttatcgttatttaattaa

SEQ ID NO: 2329 - DNA, 867 bp, Unknown
  Unknown gut bacteria
atgagtttgttatttaacaataatattgaaaacacaaaggtctatgcatttgttgggccttctggaacaggaaaaagttatagagcgcagatggtggcaaatgaaaatggaataagctatataatagacgatggacttttaataaaggaaaataatgtcatagcgggaacgtctgcaaaaaaggctcctactaaaatagaaacggttaaaagagctatttttgtgaatgaacaggaaaagcaagaaatgaaaaaagctataaaaaaatacaagccagaagcaattttaatattgggtacttctgacggaatggtagaaaaaatagcagaaaatttgggattgcaaaaacctgcaaagaccatatatataaatgaagttgcaacagaaacggagatgcaaaccgccaaaacaataaggaagacagaaggaaaacacgtaatacctgtgccaacatttgaaataaaaaaagatttttcaggctatatattagatccgttacaaatatttaaatcaaagggaaaaggaaatgcaccatatatatctgaaaagtcaataataagaccaacattcagctatttaggaaattttgtaatatcagatacagtttttagacagattgcagaatatttggctaaaagaacagatgcaataaataaaattataagaattagagtagaaaaaacaccggagggaccgacaatttatatggaagtgattgttacatatggttataatgtattagttgcgttgcgagaatttaaagaaaaagttataaaggaaatagaaaaattaacaacaatgaacgtagttgatattacgattgttgcaaaaggtatatatatgcctgaagaaaaaaaagatatttaa

SEQ ID NO: 2330 - DNA, 603 bp, Unknown
  Unknown gut bacteria
gtggttaaagtattgaaaagagtagaaaaattaggaggaaaaatgtatttaatagttggacttggaaatcctgaaccagaatactcaaaaacaaggcacaatatgggatttgatgtaataaataaattagcaaaacaatatgaaatagaattgtcaaggagtaattttgaaggaatatacggtacaggcataatagaaaatgaaaaagtaatcttgttaaaaccacaaacatatatgaatttgagtggacaatcaataaaaaaatatatagacttttataaaataccattagaaaatatattagtagtatttgatgatatggatacagaaaagggaaaaataaaaataagaaaaatgggaggtccaggaactcacaatggcgcaaaatcagttgtacatgaactacaaagtgaacagtttgcaagaatacgagttggaataggaagaccaatagacaatgatgaaataatagactatgtaataacaccaatacaagatgaacaagaatataaacaattagaaataggaatagaaaaagcaaaagatgcaattatagaatatttaaaaaacggaatagataaagcaatgaataaattcaattaa

SEQ ID NO: 2331 - DNA, 261 bp, Unknown
  Unknown gut bacteria
ttgggtaaattttacatagaagaacgtgctgtagatttagcacattatattatagatactggagatactgtaagaggtgctgctaaaaagtttggtatttctaagagtacagtacacaaagatgtaagcgaaagattaaaaaaaataaaccctgctttatttttagaagttagaacaattttggatgaaaacaaagctgaaaggcacatacgtggcggcatggcaaccaaattaaaatatagtcataagtctaatatatga

SEQ ID NO: 2332 - DNA, 1026 bp, Unknown
  Unknown gut bacteria
atgaaagtatcagattttaattataatctgccacaagaactaattgcacaggttccaataaaaaatagagatgagtcaagattaatggttttagataaaaagaataaaacaatagaacacaaaatattcaaagatataataaattatctaaaaccaggagactgtcttgtaagaaataatacaaaagtaataccagcaagactatatggaataaaagaagaaacaggaataaatgtagaatttttacttttgaatagaattgaaggcgactattgggaagttatggttagaccgggtagacgtttaaaagaaggaacaaaagtaatatttggaaatggaatattacaggcagagatattagaaataatgaatggtggaaatagaaaagttaaatttacatatgaaggaatttttaacgaaattttagataaaattggacttatgccattaccaccatatattcacgaaaaactaaaagaaaaagatagatatcagacagtgtatgcaaagtatgaaggctcagcagcggcaccaacagcaggtctacactttacaaatgagctattagaagagattagacaaaaaggaatagatatagcaaatgtaacattgcatgtgggaataggtacctttagaccagttaaagaagaaaatgtagaagaacatgctatgcatacagagcatttttacattaaacaagaagatgtagaaaaaataaataaagcaaaaaaagaaggacacagaataatagctgttggaacaacttcttgtagagtgttagaaagtattgcagatgaaaatggatatgtaaaaccaatagaagcagatacaggaatattcatctatccaggttataaatttaaatgtatagatggtttaattacaaattttcatttaccagaatctactttaataatgctagtgtcagcgttagcaggtaaagattatataatgcatgcatatgaggaagcggtcaaagaaaaatatagatttttttcttttggagatgcaatggccatattataa

SEQ ID NO: 2333 - DNA, 1881 bp, Unknown
  Unknown gut bacteria
ttgagaatattaaaagattttaaaatacctaattttaaatttccaaagttaaaaatggataatttgtcaaagatagacaatgtagaagttaattatgaagatgtaaaaaaggcagaagaatataaaaaaagaagaaaaaaagaaaattatccaactacatcatatacaacaataaaagaaatatttgcaaaaaacatacaagaattttctaaggaaactgcaatattagaaaagtttaatccaaaagaaaaatttacggaaattacatatgaacaatttggaaatgatgttataaattttggtacagcattaactaaaaaattatgtttaaaagataaaagaatagtaattataggggaaaatacatatcactggtatgtatcttatatgacaatgttatgcggggctggaatagctgtacctgtcgacaaagaattacctgagaacgaaatagaaaatgtaataagaagagcaaaagcatcagcagttattttttccacgaaaaaatcagatgcaataaaaaaaatagaagaaaaactaccggaagtacaatactttatacaaatgaattcagacagcgaaatatctggaaaaaatgttggaatggactgcttaataaaacagggcagacaacttgtagagcagggagacaattcttttatggatattaaggtagatccagacgaattcaaagtgctaatttttacttctggaaccacatcaaattcaaaaggggtaatgttgtgcaacagaaatttggctgcaaatattaatgcggttttagcatatgttaagttatatccgagtgatagatttatgtctattttgccattacaccacacatatgagtctacaattggatttttattaccgtttgcaataggtggatctgtagcagtatgccaaggactaaaatatatagtaccaaatttacaagaaacgaaacctacagcattattgacagtaccattattggtagaaaatttatataagaaaataaatgcaaacattaaaaaaagtaaaaaagaaaatatggtaaattcaatgatacacgttacaaatgcattaaaagcagttggtgtagatatcaagaaaaaggtttttaacgaaatacatgaaaatttgggaggaaatttaaaatatatagtttccgcagcagcaccgatagatgctaaaattggaaattggattgaagatattggaataatttttttacaaggatatggcttaacagagaccgcaccaatagcagcacttacaccagagtttgacgcaaagattggctcagcaggcaaagctgttgtaggagcagaattaaaaattgataatccaaatgaaaatggcgaaggagaaatattaataaagagtcagacattgatgttaggctattatgaagatgaagatgctacaaataaagtaataaaaacagtagatggtgaaagatggttctattcaggagatataggctacttggatgatgaaggatttttgtatataacaggaagatgtaaaaatgttattgttacgcaaaatggaaaaaatatatatccagaggaaattgaattgttattgggagatatcccagaaattaaagagagtcttgtatatggaaaagagcctgaaaatgacagaaaagatgagaatgaattaataatatctgcaaaggtaataccaaattatgaagagatagaaaagatacatggaaaaggtttaacagaagaacaagtatataacattatttgggaaaaagttaaaagcgtaaacaaaaaattgacttcgtataaagcaattaaaaatttagaaataaaacatgaagaatttgaaaaaacaacaacaatgaaaataaaaagatatgcggagctaaaaaaagacaaaaattga

SEQ ID NO: 2334 - DNA, 441 bp, Unknown
  Unknown gut bacteria
aataaggaagaatttatgaaaaaaaacctttttataattttaacaatattacttataatagctataatagtgggttataccgtacacaattatagaaaacagcaaattcaaatagcacaatacaacaagcaatatgaaagctggtatggcaagaaaatattaggcacagattttataagtataataaataaaacaatagataacaacgaaaagaatgatgtacaaaaagatgaaaataatgtgtatctagaagataatgaaaaatcagtaaaaatatatatgaaatttttagaaagtgaccaaacatttgacatggaagctattgcaaacaacggaatagaaaattttatacaaaattatgcaacatttagctttaaatgtacaaaaattgattaccataaaaatggaaatgtaaaaagcttatttttcgaagaagtataa

SEQ ID NO: 2335 - DNA, 837 bp, Unknown
  Unknown gut bacteria
atggaaataatatacaatattttagaaacattaataccatttgaatttattaattatacatttatgaaaaatgcattaattgcaataatattagtatcgccagtatttgcaatattaggaacaatgatagtaaataataaaatggcttttttttcagatgcccttggacattctgcaatatgtggaattgccataggaacactattaggaatatctaatgtaaatatatctgtaatattttttgctgtaatttttgcgttactactaaattgggtaaaaaacaaaacaacatatggtgcagatacaataataagtgtattttcctcaattgccatagcactaggtttagcaatacttgcgcaaagtggtagttttaacaaatactcaagctacctagttggagacattttaagtattacaaatgtagaaatagtatacttgtttttaacatttatatctgtattatgtttttggtattttacatttaataaattaaatgtaataagtataaatacttcgttagcaaaaagcagaggcataaacataaaacttattgataatatatttgttgtattaatagcaattatagtaatgatatctataagatggataggaatattattaattaattctttactaatattaccagcagcatcaagcagaaacatagcaaaaaatatgagaacatatcatttattttctataataatttcattattttcaggcgtattgggattaatattatcatattattataatataccaacaggaccaatgattgtaataatttcaggagcaatatattttgtaacatttgcaataaagagaaacagataa

SEQ ID NO: 2336 - DNA, 978 bp, Unknown
  Unknown gut bacteria
atgatagatagagaacaaaatccagaatttattaattcgtttttggattattcaataacaatattaaataaatctcctaactctataaaggaatacaattatgacttagctatgttttttaaatatatgaaaatacactttcatctaactaatgaaagtgattttacccaaattgatattaaggatttcccattagaaaaagtaaaggacattaaactagatgatattcattcttttattgcatacctagctacaaatttaaaatctaaagcagctacacgtgcaagaaaaatatctaccatacgaatattttttaattatttgaccaacaaagctcatatactagaaataaatcctgctcagacactggaaaccccaaagcaagataagcgcatacctaagtatctttctcttgacgacagtaaaaagcttttaaatataactgcttcagaagaaaatcgcaataaagaaagagattatgctattataactttatttttaaattgtggcatgcgtttgtcagagttagttggaataaatattaaagatatagattttaatgaatgtaaacttaatgttattggaaaaggaaacaaagaacgaactatatatttgaataaagcctgtataaacgcaatagatgactatttaaatataagacctaaggaaaaaatacaatataattctaaagatgctttatttttaagtgagcgtagagaaaggattagcaacagaactgttcaatatatagtaaaacaggaactgctaaaagctgggttagatataaataaatattctgttcataaattaagacatacagctgctactttgatgtataaatatggaaatgtagatataagagctttgcaagaattgctaggacatgctagcatatctacaacagaaatatatacccatgtagataacgagcaagttcgaaatgctgtggaaagcaatcctttaagtaattttaattaa

SEQ ID NO: 2337 - DNA, 186 bp, Unknown
  Unknown gut bacteria
atgaaatttaacaaagacacaaaaataggagaaattatggaagtagcaccagaaaaagcagaaatactattaggcataggaatgcattgcttaggttgtccagcatcacaagcagagactatagaagaagcatgtgaggttcatggtgttgatgtagaagaactactagaaaaattaaatgcataa

SEQ ID NO: 2338 - DNA, 834 bp, Unknown
  Unknown gut bacteria
atgagaataggactggctttatctggtggaggaataaaaggaacggcacatataggggcaataaaagcatttgaagagaatcaaatagaaataagtgctgtaacaggaacaagtataggcagtataattacagtgttagtagcaatgggatatacagcagaccaaatgctagatttattcaattattttgccaaggacatatttagagcggagcctagatatttaatgtcaaatataaagaattcaaaaagactcttaggctatggtgcactgtcaggagaaacaatagagaatgtaatagatgagtgtgcaaaatacaagggattgtataatataacagatataaaaatgcctatagctatttcaagtgttgatataattaattgcaaaaaacatgtatttacaaatagaatagttaaaaatgatgaaaaatatataaataatatttctattggaaaagcagtaagagcaagttgcagttttccaggattatttgcaccatgtgaatttgaaaattataaatttgtagatggtggaatattagacaatgtaccagtagaagaattagaaaaactaaaagtagacaaaaaaattgcaattaaatttccaccagaccttacagataatccaaaaagcgcatatgatgtagcatttaaggcaatagacgttatgtttaatgaaaaagatgaaagaacagttaaagaatgtgattatgtaataaatgtaaaaattccatctggaaatgtttttaatgtaaaaaaaataaaagactgttacaataaaggatatattgaaacagtatctaatattaaaaatataaaagaaattttataa

SEQ ID NO: 2339 - DNA, 207 bp, Unknown
  Unknown gut bacteria
atgaaaggaagggtgaaaatgccaaatttaagtcaagtagaattacagaatttaagacatttgataggagcacacgaaacatcttatcaaaaactaaacacatatgcttcacaagcagtagacccacaaattaagcaaatttttacaaaatcagctcaagatgcattaaatactaaacaaaaattaatgtcatttttaaatggatag

SEQ ID NO: 2340 - DNA, 858 bp, Unknown
  Unknown gut bacteria
ttgtcattttcattagaagtaaaaaaagaattaagcaaattaaatacattagtagataaaaagaacgttaagaccgaactcttaggatatatggcaactaataatgttagtgtgcaaaaaaataaaattaagttttcaacagaaagtgaatataacataaatagatttggaaaattgctcaataatctaggactgaatgatcataatataaaaattcaaagaagtgtttattcaattactataaacaaaaattatattgaagaattaacagaaaataataacgataataaaagtgatgatttagaaaaggcatttataagaggggcttttttaggaagtggaacaataaataatccagaaaaaaaatatcatttggaaatatcgttaagaaatttagaaagtgcgaaatacatattggaaatactaaaaaagtataatatagattttaaaattttagaaaaagcaaaaggttattcaatatatacaaaagatggagaagaaatatctaaatttttagcattgataggagcgaattcttctgtactaaaatttgaggaaatacgagtatatagagatataaaaaataatataaatagaaaagtaaattgtgaaacggcaaatttaaataagatagtgaattcatcagtaaaacaaattaatgatataaaatatttaagggaaaaagagaagtttaatgaattgccagaacaattaagagaaacagcggagattagagaggaaaatccagatgcatctttagaagaacttggaaagttgttgaagaatcctataggaaaatcaggagtaaaccatagattaagaaaaatacaacaaatagcagaggagttgagaaaatag

SEQ ID NO: 2341 - DNA, 1053 bp, Unknown
  Unknown gut bacteria
atgagaaagcatattcaatctaataccactacaggatataaaataatagcagttgatgatgatagcggtgtattagattctttatctgtccttttgaatagaaatggttataactttgtaggaataactgatccaattcaagcaatagaacgtgtaaaaaaagaacattttgatttaatgctattagactttatgatgacacctattcatggagataaagttgttgaggaaataaggaaatttaataaagaactttacattttattactaacaggacacaaagatttagctccaccattagagactataagaaaattggatatacaatgttattgtgaaaaaagcgataaatttgaccaattgcttctattagttgaggctgcaataaaatctgttgaacaattaaatgaaataaatcgtataaataatgaattatcagatgcttatagtgatctggaaaaggcatatttagacatggttgaaacacttagatttacagttgaagcaaaagacccttatactagaggtcattcagatagagtatctgcatactctgttttaattggtcagcatcttggtttatctgactctgatattaatactttaaaaattggtggcttatttcatgatatcggcaaaataggaattccagacagcatattgcttaaagatagcaaacttacagatgatgaatattctgaaattaaaaatcatccatctattggtgcacatattttatgcaatgcaaaagtatttcaagatattatacctattgtaaaacatcatcacgaaagatatgatggaaaaggatatccttctcaactagctggtgaagatattccatatttcgccagaatagctgctgttgctgatacatttgatgctatgacatccaaaagaacatatagagatgctttacccttagaggtagtcaaagcagaaatagaaaggtgtgccggaacacagtttgaccctaaaattgctaaagtattcttagatattttgaataaaaattatgaagaaatacaaaaaattcaagaacaatataggtaa

SEQ ID NO: 2342 - DNA, 1677 bp, Unknown
  Unknown gut bacteria
atggcctttgatggtttagttaccaaaagtgttgtatatgaattaaataattctttagttggtggaaagatagataaaattttttgcccatcttctgatgaggttttaattggtgtttatgtaagtggtataaaatatgcacttaatataaatatttcctctgctaattatagaattaacttaacaacaaatacaaagcctaatcctcttgttgcctctaacttctgtatggttttaagaaagtatttgttaaacactaggatttctcgaatttattctttaggcttagaaagagttgttgttattgaatttgaagatttagatatgtctgataattttacaaccaaaaaactaatagttgaacttatgggaaaacatagcaacgtcattttgcttgatgattgtgatattataataaatagtttaagacatttatctacttctaatggttcaaatagagatatattgcctaaatttaaatatctatttcctacttctaataagctagatttattgtcttataataattttgatgactttgaggaattatttaatgataaaaataacgatttaccgacttgcttttctgctatgtttactggaattagtagaaattttattgaacattgttgcactctattaaatattccttgtgaaataaatagccaaaatttatttattatatacaattatatttgtaatttaataaataatctaaattcaaataatattatatgtgcattgtatgataaagatttctatctagagaatggaagtaaagaaggcaatttgtctattaatttctttttggacgacttttacaccagaaaagaagatgcggaaaactttaaaaattttaagaataatatattaaaactattacttaacaatataaaaaagctacaaataaaattgcaaaatattaatttaaagctaaaagaatgcaatgagatgaatacttataaattatacggcgaattaattataagcaatttatatcgtataaacaattataatattaatagtgttgacttagaaaattattatgaagggaacaaaataataacaattcctttggatagttcaatttcgccaagtgaaaatgctaaaaggttttttaaaaaatataacaagttaaaatcgacttacgaaattgtaactaagcaaaaatttgaaattgagcaagaaattgagtacatagaaagcgttatttattctgtaaataatgcactctcaattgaagaattaaatgatgtgtatgatgaaatttctggtatacttgtaaaaccttctaaagtaaaaaatacttctaacaaaaaaaagaattttgaagtaataaaatatgcaatagatgaatttaccatttttgttggaaaaaacaatttacaaaatgaatatattactcataaattagctaactcaaatgactactggtttcatgttaaagatagtcatggaagtcatttaatattaaagactgatggaaaaatgcctccacaagaagttataaataagtgtgctgccatagctgcatattacagtaagtctaaatattcatctaatgtacctgttgattatactttgaagaaaaacgtaaaaaaaatgcctaaagcaaagcctggcatggttatttatactaattataaaactgttaatgtaatacctactaaaatataa

SEQ ID NO: 2343 - DNA, 990 bp, Unknown
  Unknown gut bacteria
atgagtgtaatggatgaatatataaaaatagtacaagacgctataactaaatatttaaagttagtttttgaaagaaaatttaataaacaaatatgtgacagctacataaaaacatacatagatgttagatactataatgtaaacgaacgcggaaaccatagaacattaagaaaagaaatattagaaagtttaaaagaaaagaaaaaaagattaatagtagataataaatcaaaacaattactaatagaaaatatggaaatgttttttatatatgtattgtatatagacaaagttacaccatataaaacaatagatgatttagtaaaaaacatatgcagactaagagttaaaatattaaaaaaagaagatgaaaaatttagaaaattattaaaggatttaatagaagatgatataaagaaaaaagaagaatatttaaaaaaatttgatagtaaagttttttctttaaaattaacagattacaatagcacaaatgaggtacaaagagtaagtttaaaatatcatatgaaattttctacaatatttagcgctacagcaatagaacgagcatttaatactggaacaacaagtgaagacaagttatttgtagagtataatatgataagtgcacaaataataaaagatataataaaaggaaactttaaaaaacaatatatagttgaatttgcggattcattatttgaaaaaaaacaaaaaataacaagactactaaatattatagacaattcagcattgcaggacaaattaagtattaaaataagacacgaaacatttttaaaatatagagatgatgcttatgaaatgctaagaagtgggtataaaatagcacttatagcagatgaaacaatagacacagatagagcagaattagaaaaattaaaaatgtttaaatatattttaataaataaagatgctccttattatgaagaaataacaagaaaaaaaagattgcaaaacataatagaaatttaa

SEQ ID NO: 2344 - DNA, 732 bp, Unknown
  Unknown gut bacteria
atgaatcaaattcttgtaacagaaaaactgtatattacgccagaatttaagagaaaaagaatgctttataaaattgaattctttttatctgtttttttggtgtttgctttattttcttattatgtttatgcagagtatgatagaaataaaaatgaaaaagtatcacaagaaatattaaatcagattgctgcaacgaatgcaatagacacaacaacaagacagccagaagatgacattattagagtaattatagacgaccaagaagaattgacaccggagcaagcaaaaagaatagaagaagtgcaagagaattcaataatatatactgcttcaaatggagtggaatatgaaacagatgctattttaaacataccaagactaggaataaattatccagtgttaacagatacatcagacgaattattagaaatttcgcttaataaatattggggaccagatccaaatgaggtgggaaattactgcatagtaggtcataattatagaaatggaaagatgtttggaacattaagctctataaaaaatggtgacatagcagaattgacagatggatatggcagaagaataaaatatcaagtatatgataaatatgtcgttaaaccaacagatacaggatgtacaactcagcatacaaatggacaaaaagaactaacattaataacctgcacaaactatggaaaggaaagacttgtagtaaagtgtagggcaatatag

SEQ ID NO: 2345 - DNA, 942 bp, Unknown
  Unknown gut bacteria
atgataaaaatgtataatacagatattaatacaaacatcacagaggaaaccaaagacctaaaaaaaggtaattggattaacatgatatccccgacagaagaagaaattcaacgtgtgtgtgcagcacttcaaattaaacaagactttataagatattctttagatgaagaggaaaaagccagaatagacacagaagatgatgacaatacaacattatatataatagacattcctgttatagaaagtgacagaactagaagagtatacgtaacaatgccaataggtgtgattttcgtaagagatgattatataattacagtatcacaaaaaaataatgatattattaaagatataaaaacagaaaatgttataacatataagaaaagtagatttttattacaaatattatatgcaaactcaaaaaaatttttaagcttattatataagataaataaagaattagaaagtacagaaaataaactaaaaaattctttgcaaaatgaagggctactaaaaatgttagatctagagaagagcttggtttactttacaacatctttaaaatctaatgaagttgtaatggaaaaaacaacaagagggaaaattataaaattgtatgaagaagatgaagacttgctagaagatgctattatagagaacaagcaggctatagaaatggcaaaaatatatagtgatattttaagtggtacaatggatacatatgcttcaataatttctaataacttaaatgcggtaatgaaaatattaacatctgtaacatttatacttgccataccaacattaatagcaagtatatggggaatgaatgtagaacttccatttcaaagagaaccactaggatttttaataattacagttttttctataataatgtgcatagttgcaacaatatggttaaaacgaaagcgtatgctaaattaa

SEQ ID NO: 2346 - DNA, 693 bp, Unknown
  Unknown gut bacteria
atggaagatggtatagaagagcatttacagacaagggtgaaatattgcggtagtttgcaaaatgaagaatgcaagatagacagcataacacaaagctgggcagtgatatcaggagttggagataatgacaaaaaatatatatcaatggaaagtttagaaaatcatttaatagataggcaaagtgcaattattaaactattagacccaccatttaatcaaagcaatttagaaccaggatatatcaaagcatatttgccgggaacaagagaaaatggaggacaatacacacatgcagctgtatgggtaataattgcagaagctttattaggatttggagataaagcaggagaattatttagaatgataaatccaatagaacatgcaagaactaaggaaatggctaataaatataaagtagaaccatatgttgtagcagcagatgtgtatggacaggagaatttagcaggaagaggaggctggacttggtatacaggatcaagtagctggatgtatgaagcgggattaaaatatatactgggattaaagattgaaaatggagaattaaaaatagaaccatgtataccaaatgactgggaagaatatagcataaaatataaaacaggtaaaaaagtatataatataaaagtaacagaaaaaggaaaaaatatttcaattaatgtaataggtgattaa

SEQ ID NO: 2347 - DNA, 858 bp, Unknown
  Unknown gut bacteria
atgaatagagaaaatagcattaaacgtgctagtatctttggaattgcaggaaatctgtttttacttataattaaaggaaccgttggctttattacacatagtcaagctatgattgctgatgcagctaatagtgcaggagatatttttgcctctcttatgacttttataggtaataaaattgcttctgttcctcaagatgctgaccacaattttggacacggaaaggcagagtatattttttcgttatttataagtttatctatgattggtatttcactaaaacttttatatgattctttaatttctttaatttatggatttaaatttgagttttcttggtttttagtaattgtttgtattgctactattattgttaaactatgtttatatttttatacaaaaattttagctcataaatttgatagtatattactagaggcaaacaaagaagaccatagaaatgattgtattattactacttttactcttatttctattctattaggtttgctaaaaatatattggtttgacggaattgttggaattggaatatctgcttggatttgcataacaggagttaagatttttatagaaagttataatattttaattgatacttctattgattcaactacccaagacataattttaaacttagcacaaaaatacacaaatattaaaaaaatagacaatatttcatcttcgccagttggatataaatatgttgtatttattaccatttgcgttgatggaaatatgtctacatttgacagccataaattggccgataatctcgaaaaagatatttgtggacttgacaaagtttataaagcaattgtacatgttaatcctatttaa

SEQ ID NO: 2348 - DNA, 891 bp, Unknown
  Unknown gut bacteria
atgaagtcaggttttgtatcaatagtaggaaagacaaatgtcggaaaatccagcataataaattcattagtaggagaaaaggtagcagcaatagcaaatagaccgcaaacaacacgcaaagcaataaaagccattgtaaatagaccagattcacaaattatatttatagatacaccaggaatacataaaccacaaagtaaattaagtgatgcaatgatagaaacatcactaacttctatacaagatgttgacttaatagtatttgtagtagaagcctttgcaaaagaaatatcagaagaagaaaaaataatattagaaaaaataaaaaaagccaaaaagaaaacaatattagttataaataaaatggatttagcaagcatagcacaagttgcaagagcaatggaactatataaaaatgaatatgaatttataacaatagtaccaatggttgcctctaaacaagaagattcagaaatactattagatgaaatagaaacaaacttatcagaaggaccattatactatgatacagaagaatatacagaccaaacaatgcaacaattagcagaagaaatgataagagaaaaagcattaaaactattaagagatgaagtaccacatggaatattggtagaagtagagcgaatgaaaagaagaaaaacaatgaaaggcgagccaatatacaacatagaagctaccatatattgtataagagaatcacataagggtataataattggaaaagatggagaaatgctaaaaagaattagtacatatgcaagacaagatttagaaaaaatgttaaatacaaaaattaatttaaaagtatgggtaaaagtaaaagaagactggataaataaagattctattgtaaataaatttaaaatgtag

SEQ ID NO: 2349 - DNA, 405 bp, Unknown
  Unknown gut bacteria
atgaaaaaatttatagcagtcataacaatttttatgtgcctattaagtgcaaccacagtatacgcagcaaatacagaaaatgtaatagaaccaacgaaaacaagtggaactctagttgaaattaagcaaaaagaaattaaaacaatggaagattatgtagaacaatatggaaatgaaacatatggatatgttgcatacatactaaacttagttagaatatatagtatacctttttgttttgtaggaatagttattagtgctatatatcgttacgtaataggaataagaaaactggatgtgcaagacaaaggctttggtgtaatgataggtatagtaacagttttagtaatatgccaaatattaccattgatttttgcaatagtagtaaaaggttggaggggttaa

SEQ ID NO: 2350 - DNA, 807 bp, Unknown
  Unknown gut bacteria
atgacaataatacaaacaattattttaggagtaatacaaggattaacagaatttttaccaatatcaagctcagcacacttaaatttatttccttggctattaaagtggcaatcgatgccagattcttttgatgttgcactacatgtgggaacactattggcaatagtagtatatttctttaaagattggataaagttaatagtgggaggctataagcaagtagtaaaaaaagataagacgatagaaggaaaaatattttggcaattagtaatagcaacaataccagcgggaatattaagcttaatattagataaaatctcaagcaaaataataggagacaatttaaacctaaaaatgatattaatagctattgctttaattgttatgggcattttattatactgggtagacaaaaattctaaatcaatagtaaaatatgaaaaaataacattaaaacagtctatattaataggcatatcacaagcattagctgctgcatttccgggagtatcacgttctggaattactatgacagtagcaagatggctaaaaatagatagagaaagtgctgcaaaatattcttttctattagcaacaccaataacagcagcagcagtaattttcagcttaggagacttggcattaacaagtttatcattttggataggagtagtaacaagttttattgttggaattttagtaattaaatttttattaaattatttaaggaagggaagctttaaagtttttgcaatttatagaataataataggtttaataataataggaatagtatttataagataa

SEQ ID NO: 2351 - DNA, 444 bp, Unknown
  Unknown gut bacteria
atggaaaatattttgccccgtcgtgaagcccgcgagaatgcgtttctgctggctttttcgcagacgtttggtgacgtgcccctgcgggaggctctgctcaacaacaccgaggatgaagagcatcccgtggatgtgttcggcaagcggttgctgaacgcttactatgaccattctgctgaggtggacgacctcatcagcagccatctgcgcaactggaccatgtcccgtctgccccgcgtgagcctgacggtgctgcgcctggctctggcagagatgctgtacggcgacgagaaaaaggttggcgtcgtcatcaacgaggcggtcgaactgaccaagaaatacggagcagatgaggattaccagttcgtcaacggtctgctgggcaccgtcgcgcgggagcagggtctggacactgccgaagatgcagcgtccgaagagccgtga

SEQ ID NO: 2352 - DNA, 537 bp, Unknown
  Unknown gut bacteria
atgccgaaccaccgccgcaacgattccaagacccgcagcatcgccctttcggggctgctgtttgcgctggccatggcgctctcattcgttgagggcacactggtgcttcccggccttttgccgggcatgaagctggggctggcgaatattgtggtgatgtacgcattgttctttatggggccgaagcaggcgctcgtgctggatctcctgaaagcgctgttcgtctttctggtctccggctggacggcggggttcctctcgctgtgcggcggtctgctctcgctgctggtgatgtggctgctgtattatcacgcaccggtgcgccccacctggtacatcctctcggtatgcggtgcgctgttccacaacattggtcagcttctgggtgccagtgtgatcttatcttcggcggtctccctctattatgcgccggtgatgctggtgctcggcctcgtgatgggcgcactgacgtccatcacgctccgggcgctgctgccggctctgggccgcctgggctacaatataaaagaaaaataa

SEQ ID NO: 2353 - DNA, 600 bp, Unknown
  Unknown gut bacteria
atggaaagcaccctgatcagctttgtgcaccagctgggaacgctggaattctggcagacattactggacagcttcggagacctcggcccccttgcgcccatctttctggcaatggtggagtcgttttttccgccgctgcccctcatcgccatcgtggcgctgaatgtggcggctcacggcggccttttcggttttgtgtacagctgggtgggcgtcatgctgggcggcaccctgatgttcctgttctggcggcgggcgctcaaacagtttttctggaagttcgccagccgttcccagaagctggaaaaagctgagcagtgggtcagccggttcgacgtttcgtccctgttcatgctgtcggtgctgccgttcaccccttcgtccttcatgcactttgccttcggcatctcggattttgacgaaaaacgctacctcatcaccatgctgctgggcaagggtgtgatggtggccatgatggccctcttcggccagtccctcgtcagctcgatgaagaacccggtctacctcgtcctcgccgtcgtcatctggggcgcgatgtactggggcagcaagcggttctgcaaaaaacatgatctgtaa

SEQ ID NO: 2354 - DNA, 2247 bp, Unknown
  Unknown gut bacteria
atgagagagatcatttccttgaacgaaaactggaccctgtccttccccaagggcgaccatgtgacggagcaggtcaacctgccccacacctggaacgctgtggacggcaacgacggcaacggcagctacctgcgcaccaccggcgtttacacccgcaccttccagcagcccaagcagccccgtgagggcggccgcacctatgttgaggtgctcgctgctgcgctgagcgccaccgtgaaggtcaacggcacggtcgccaccacccatgagggcggcttttccatcttccgtgccgatgtcaccgatctgtgccacgagggtgagaacgagctgaccatcgaggtctccaacgaggacaccccgtccatgtaccccgcttccgccgacttcaccttctacggcggcctgtaccgcggcgtcaacctgatcagcgtgcccaatgcacactttgatctggactactacggcggccccggcatcatggtcaccccggtccccacggaggacggcggtgcaaacttcaccatcaagagcttcgtcaccaaccccgctgacgacctgaccgttctgtacagcatcgaggactgcttcggccgcgaggtcgcttccgctgtccgcggctctgccgagaccgaagtcaccatctacgtgcccgatgcacagctgtggagcatggacgagcccaatctgtacaccgtcactgcgaccctgcagcgcaacaacgaggccgtcgatgagatctacgccaacgtcggtgtccgttccttcaaggtcacgcccaacgaaggcttctccatcaacggtgtgcccaccccgctgcgcggcgtttcccgccatcaggaccgcgtgttcgagggcaacgcgctgacccccgaagagcactatgaggacgccatgctcatcaaggagctgggcgccaacaccatccgtctggcacactatcagcacagccaggacttctacgatgcctgcgacgagatcggtttcgccgtctgggctgagatccccttcatcagcgtcttcaagaagggcgagggcgcacacacccacgtcatggaggagatgaaggagctcatcatccagaactacaaccacccctccatcatgttctggggcatctccaacgagatcctgatcggcggcatctctcaggagctggtggacacccaccacgatctggaaaaactctgcaaggagcttgacccgacccgcctgaccaccattgcacacgtttctcacacccccgtggacggccccatgcaccacatcaccgacctggaaagctacaaccactactttggctggtatggcggcaagattgaggacaatggtccctggctggacaagttccacgccgaccaccccgacatctgcatcggcgtttccgagtacggctgcgagggcatcatcaactggcacagcaacacgccggagtgcaaggactacaccgaggagtatcaggcactgtaccacgagcacatggcacaggtcttcgaggaccgtccctgggtgtgggcttcccacgtctggaacatgttcgacttcggctgcgctgcccgtcatgagggcggcgtgagcggccgcaacaacaagggcctcatcaccatggaccgcaagaccaagaaggacagctattttgtctatcaggcttactggacccagaccccgatggtccacatcgctggccgccgccacgcacagcgcgcaggcgagaccaccgagatcaaggtctactccaaccaggacaccgtcgttctgtacgtcaacggcaaggaagtcggccagcagaccgcgcaccgcgtcttcaagttcgacgttgctctgaacgaaggcttcaacaccatcctggctgtggccggcgatgtgaaggattccatcaccctggagaaggtcgccgaggagcctgcttactacaccctgccggagttcaacgagcgccaggagggcgttgccaactggttcaagcaggtcggcagcctggatctggacctcaaggctcccatggagttcccggaaggctactacagcatcaaggacaacatggaagaagtctccaagtgccccgaagctttcgccctcgttgccaaggtcgtgaagctgaccaccaactttgatgtgaagcccggctccggtatgtgggatatgatgaagaccatgtccccggagaatctgggcaacgtcatggctctgcccgatggcttcctggagagcctgaacgcacagctcatcaagatcaagaaggtctga

SEQ ID NO: 2355 - DNA, 2586 bp, Unknown
  Unknown gut bacteria
cggccgcccgccatcagcggcgcacagtgcaccacccgccgggaagccctcatcgacgacgccactgccaaactggccgatgccaagcagacctacgacgagcagaaagcggaggccgaacgccagtttgcacaggccgagcagaagctcgacgaggccgaagcccagctcaccgccgccaaagcgcagctggagcagggcgaagcggagtacacctccggcaaggcgcagctggcccagcagaaagccgccctgcccgacaccatgcagagcggtgcagacaaagtgctggtcggcgaggagcagatcttggaatttgaagaccagctccagcagatcgagcttctggtcaacctgaagcaggtggccgacccgctgctgacctatgccgaagccgcgctccacaacgcacagaaagcgctcgacgaggccgagcccgccgacgaggagtacaccgagctgcgggatgccctcgccaaggcacaggccgcctacgacagcatctacgcccagctcaacggctaccagcagcagctggacgagggcaagcggcagatgtatgcccaggggctcctctcctcgcccagcctttccaataccgaactcgtcaccgaggccaaagccgctctgcggaagatgaagctggaactgatgcagggccagctggggctttccaccggcaccgcctctgcctattccgcctttgctgccgccgaacagcagctcgccgatgcccgcacccggctggatgacggctgggctgaatacgataccggcaaagagcagctggacgcctcccgcaccgaatacgcaacgcagaaagccgaggcggagcagaagctcgctgacggccagaagcagatcgatgatgccgaagagcagatctctgacatccagaacggcgagtggtacgtcctcgaccggaacagcaccatgagcttcgtcacctttgagcagtatgccgaccggatggacgccatcgcacgggtcttccccgtattcttcttcctggtggcggcactggtggcctccaccaccatgacccgcatggtggacgaaaaccgcctgcagatgggcaccctgaaagcgctgggctactccaacaccgccattgcgggcaagtacctgttctacggcctggcctccagcatcctgggcagcatcctgggcatggcggtgggcttcgtcgtcttccccaccatcatctggcaggcctatcagaccatggtgttccgcctgcccaccttcaccctgcaattctaccccggcatggccgtgggaagcgtcctgctcagtgcggccgtcatcggcatcaccacctgggaggcctgccgcgccagcctgcgcgagaagaccgccgccctgctcctgccccgcgcaccggtggccggcaagcgcatcttcctcgaatacatcaccccgctgtggaagcacatgagcttttcccagaagaccacggctcgcaacctgttccggtataagaagcgcttcttcatgaccgtgctgggcgtggcgggctgcacggccctgcagctcatcggctttggcatccaggattccatcctgcccatgctcaaccgccagaccaccgagctgaaccacagcgacctgaccatctcgtacagcgacgccagagccttttccgtggaacacggtctgggcgatgtgctggattccagcgccgatgtgaccagctggggccgtttctacaacaagagcgtgaccatctacaatgccagcggcgacaagcagaccgtaagcatcgtgacggcggaagacgagagccagatgaccgcatatttcaccttccgcacccggcaggggcacaaggccatcccctttgacgacagcagtgccatcctgaccgagaagaccgccgagagcctggaccttgcggtgggcgacacctttgaggcggagaccagcgacggcagccgcaaaacgctgaccctgaccggcatcaccgagaactacgtcttcacccggctgtacctctcgcaggcgcagctccggacgctgacgggcggcaccctgccggagtggaacaccgtttacggccagaccgactgccccacctcggacgaccgcaacaccctgcgcaccgacctactggcctgcaattacgtcagcggcgtctccttcatggaggacacgaccgaaatgttcgacaacctcatcggctgcctgaactatgtggtcatcctgatcatcgcctgtgccgctgcgctggccgccggggtgccccacaacctcatcaccgtgaaccttggcgagcgcaaaaaggagctggccaccatcaaggtgctgggcttcttcgataacgaggtctaccgctacatcttccgcgagatcgacctgctggccctcatcgggtcgctggcgggccttgcgctgggtgtgccgctgcatcagttcatcgtccgcaccgtggagatggaccagatgatgttcatccgctccatcgcgccccgcagctacctgttcagcgtagccctcaccctcttcttcaccgtcgtcgtctgccgcctcatgcgccgccatgtccggaacatcagcatggtcgaaagcatgaaggcaccggaataa

SEQ ID NO: 2356 - DNA, 546 bp, Unknown
  Unknown gut bacteria
atgaagaaaacaaaacggatccttgcctttgcgctggcgctgcttctggctgcgctgatgctcaccggctgcaaaagcacactgacgtccatcgcccacaagctgaccggcgcgtcggacgaggtacaggaggaggacaccacccagtgggcggcccccagcagcgacccgctgatgatcgagggcatcgccgacacctccgccaaatacgccacggctgtggccaacggctcgctgaacatcgtcttcaacggcatctggagccgtcagaccgattacttcaccgcgccgaacgggatgctctccgtctacggctgcggcacggcggagggtgtgcagaagttcaagatctcgctgtggaagaaggtcgatggcggcgcacagtatgtggacaacaccacctactacttcgtcaccgacggccagaactaccactgcgacatcggcaatctggaccccaacgccagctaccggctgaccatctcctatgattcgagcaagtattacctctacggactgctcaaggtggaggggatcggcggatga

SEQ ID NO: 2357 - DNA, 549 bp, Unknown
  Unknown gut bacteria
ggaaggggggggggggccgccgtcacagccagcggcggccagatgatgacgaacctttacctcatcaatctggcatcgggggaccctgtgagcatcgcgaaccagagcggtgtgccccagtggctgggctggacctctgcgtccaccctcctggccgtgtacgacacccgcgtcgtgctctacaacgcgggcggcggcgagcgcgcagcctacgagttcgccgggaccaccctgcaggacgtctcggtggatgcggcgggcaatatcgccctgctgctggggtccggccagctgcatcagaccgtactgctggacaaaaacctgaacgtccagttcagcggctcggtggcatcggccaacgccatcgtccgggcgggcagtctgttctatctgctgtccgacagcggggtggagtgctgcaatgtctccggggagcggcagtggagccagacccttgcggccaagccccaggcacttctggccgacgccaaggagctgctgctgttcagcggcaatacggcgcaggtgctggagccgccgcaggagtaa

SEQ ID NO: 2358 - DNA, 807 bp, Unknown
  Unknown gut bacteria
atgaatcctcacacctattgcctgcgcagcctctgcgcattccttgccgctctggtccttgcggcctgtctcgcctgcccggcactggccgacgtgccccttgtgcgggatgagtacggcctgttcgacgccgacaccctcgcccagctggaatccagcgccgaggacgcttccgccgggcatgactgcgacgtctatttcctcacggtggacagcatcggcgacaccgaccagcgcgcctacgccaagaactattatgtgcagaacgaccttggctccggcagcggaaaaagcggcatcctcttcatgatcgctctcggctcccgcaagtacgtcaccatcacctacggtgggggcgtcaccgcctttaccgactaccgcatcgagcagctggaagacgaggtcgtgcccctgctgtcggacggcgactacgccgacgctgcccagacctacatcgacctctgcgccagcacactggacttctacgccgagaacggcgagccgctggattacgacaacgacccggacggcggcctcggcctgatcggcatcctcatcgtggtgggcatcccgatgctcatcgccgccgtggtctgcggcatcctgtacagccggatgaagacggcccagctcaagaccgaagccgacgactacatcggtgccggactcaagctgcgggtcaagaccgaccgctacacccacaccgaccgcgtcgaggtctacgacccgccccagcccgaaagcgactccggcggttcccccaccgacagcgacggcttcggcggctcgtcgggcggttccttctga

SEQ ID NO: 2359 - DNA, 906 bp, Unknown
  Unknown gut bacteria
atgaagatcaaagtctctgtcccggccaccagcgccaacgtcggctccggcttcgatgccctgggcctggcggtgaccctgtacaataccgtgacctttgaagagagcgagaagctggacatctcggcagcggacgggacccgcatcccccgcaacgagtccaacctggtctaccgctcggccaagggcctgttcgacaaggtgggcaagaagatcccgccgctccgcatcgtgcagaccaaccccatccccatggcacgcggtctgggttcctcgtcggcctgcatcattgcgggcctgctgggtgccaaccggatgctgggcgatatcctgaacacccaggagctgctgaccctggccaccagcatcgagggccacccggacaatgtggcaccggccctgctcggcggcctgaccagcagcgtctacgaggacggtgtggtctactccgtcaagcgggatgtggaccagagcctctgcttcgcggccatcgtgccggactacaagctcctgaccgaggccgcccgcgcagccctgccgaagcaggtctcccacaaggatgcggtctacaacctgtcgcgcgcagcgctggtgcctgcggccttctgtgagggccgccacgagctgctggccattgcgacggaggataagctgcaccagccctaccggatgccgctgatgcccggctcgaaggaagccttcgcgctggcaaagcagtgcggggcaaaggccgtgtatgtgtccggtgccggttccaccgtgatggcggtggccgagcgcgccgacgcagaggaattttacaagggcctggaggcaggcctcgaacagctggaagggctggacggatgtgaagcatttacgctgctgcgcctggatgcagataataccggcgcaaccgtggaatga

SEQ ID NO: 2360 - DNA, 468 bp, Unknown
  Unknown gut bacteria
ggcctgtgggagtacatccacgcccacgattctatgatcgacgaggtgcacggcagcacctatttcagcgaacccatcgcctttgagatggacgatggcgacatcaaagagagcatccgtccctatgccatgggccgcatcatcgacgtggaagatttcctcgtcgattatccctgcgacccggacggcggcgccctgaccatcgcgctggagatcgaggacaagctcctcccgtggaacgaccgcacctttacggtgaagttcgaaaacggcgaatgcacccagacgcgggaaccgccggagcatcatctcaaaatgggcatcggcaccctttccaccctgctgctgggctataagacggcagaacgtctgtatgagctggagcgcatcgagggcagggaagaggccgttgagcgtctggatgatgtgctcttccacaagatcccgtacatctcggattacatctga

SEQ ID NO: 2361 - DNA, 603 bp, Unknown
  Unknown gut bacteria
atgctgacgggtgaggaaatgacctgcccgacatgccaatggctccccctttgggggagctggcaatgcgaagcattgactgagagggctattgcctattacccccgcacttgcgggagaaatctaaagaaacaggtggacgataccatgagagaaattcaagttgcagaacacaagaccctgaagctgaccaatgtgctgtcgcgcaaggtggaagttgaggatatgggcaatctggccattgtgctgacccagatgcagaactttatccgcagccatgacgccatgccggtgggccccatcgtgcagtgcgtgaagatgcgcaaaggccccaaccccacggcggagatctacttcatgcagcaggtcaaccagctgatcccccggctggaccccggctaccagatggacgctctgctgcgggtgcgcaactgcctgtatgcccactacaccggccccatgagctacagcaacctcgccagccagaaactggatatctatgcgttcgagcatgagatcgagacgaccggcgattcgtacaccgtctatgtcaatcaggacgacgacaacggtgtgctcgacgtctttatggagaccaagtga

SEQ ID NO: 2362 - DNA, 780 bp, Unknown
  Unknown gut bacteria
atgacagaaagtataacgatctccccgctgatgctggtcttcctgatgtgcatgaccggctttgcaggctttgtggactcggcagcaggcggcggcggactcatcagcctgccggcctacctgtttgcggggctcccggcccactacacctacggcaccaacaaattcagcgccgcctgcggcaccacctttgccacggcgcagtttttccaaaagggtgccatgaacatcaaagtgggcctgctggcagcagcgggcagctttgtgggcagtgcccttggctcccacatcgtgctgctgctcagcgatgaggcattgcgggccatgatgctcgtcatcctgcccatcgcggccgtgctcatcctgtggcggcggaacctgccggacgagaaccgcgacgacggcaccctgacggccaaaaaggccgtgctggctctggccatcggtctgggcatcggcctgtacgatggcatcttcggccccggcaccggcacctttgccatcatcgcctttaccaccctgatgggctttgacctgcgcacagcaggcggaaacgccaaggtgctcaaccttgccagcaactacgccagcctggtcacctacctgatgaacgggctggtggtcttctcggtgggcatcccctgcgccgtcagcggcatcgtgggcaacctgctggggtcgcattttgccctgaagaacggtgccaagttcatccgccccatgatgctcgtggtgctggtgctcctgctgggcaagctcgtttcggacgcggtgctgtaa

SEQ ID NO: 2363 - DNA, 1236 bp, Unknown
  Unknown gut bacteria
gtgccgctgatccccatgtccatcgtggcggtgcagaaattcgccaaaaagctgctggacaaatactggggcgaatacaccaccctcggcgacagctttctggaaaacatccagggcctgaccaccctgaagatctaccaggccgacggctggaagcatgaggagatgaaccggcaggccgagcgcttccggaagatcacgatgaaagtgctgaccatgcagctgaactccgtgaccctcatggacctgatggcctatggcggcgcggggctgggcatcatcagcgcggtggcggcgtttgccaaagggcagatcaccctgacagcggcgctgaccatccttctgctggcggcagatttcttcctgccgctccgcttgctgggcagctacttccacatcgcgatgaacggagcagcctcggcggagaagatcttccgtctgctggcggcggacgagcctgccgacggcacacaggaagcaggggaggataccaccctgaagctggaccatgtgacctttggctacgagaacggccgcaccatcctccacgatgtctcgctgtgcatcccgcagggcagcttcgtctcgctggtgggcgagtccggctgcggcaaaagcaccattgcggccattctatccggtgcccgcaccgggtatacgggcagcgtgacgctgggcggtgtgccggtgcagatgctccgggaagagagccgcctgcgcaccttgacggtcgtgccgcacaatgcggccatcttcaggggaacggtcggttccaacctgcggatggcagcgcccgctgccgatgacgctgcactttgggccgcgctggaagaggtgaaccttgccgcgttctgccgcagccagcaggggctggacaccccgctgcatgagggcggctcaaacctgtccggcggtcagcgccagcgtctggccatggcccgtgcgctgctgcacgactcgcccatctaccgcttcgacgaagccacctccaacgtggacgccgagagtgaaaacgacatcatggcggccatccgcaagctggcggggaagaaaacggtcatcctcatctcccaccgcctggccaatgtggtggacagcgactgcatctacgtcatggacggcggccgcatcgccgagcagggaaaacacgaggccctgctggccgaaggcggtgtctacagccgcctgtacaacgcccagaaacagctggaagaccttggggaggtgagcgcatga

SEQ ID NO: 2364 - DNA, 801 bp, Unknown
  Unknown gut bacteria
atgggtgagccctctcagtcacgcttcgcgtgccagctctcccgaagggagagccattggcaggccggtcaagttgtgctgggtgaaaaggcttttgtaaatgaggaacgacagggctccgctgattgggcagcgggagcagagataaaggagagtaaaatgaactgtaaaaatcgtgcaaagaactgcggcggctgcccgctgctggaactgccctatgtagaccagctgaagcagaaggaggaaaaagtccgcgccctgctgggcagatacggcccggtgcaccccatccgagggatggagacgccctaccactatcggaataaggtgatctcgacctttgccgccgggcagggtggaaaactcgtgtccggcatctatgccgccggaacccataaggtgctgccggtggagcgctgcctgctggaagacgaggtgctggataccgtgctggaagccgtccgcgcggcggcagcggcctgccggtatcagcctttccgggaagatcagggcaccggcctgctccgccactgcctgctgcgccggggcgccgccaccgggcaggtgatggtggtgctggtcacggcccagcccattctgcccggcgcaaagaactttgtccgcgccctgctggcagaggccgaaaagcggaaggtccctgtgacgaccatcgtgcagaactacaacccccgccgcaccagcgttgtgctgggcgagcaggaaaaggtgctctacggcaaggggttcattctggatgaactcttcggcaagacctacgcgctcagcccccgcagcttctat

SEQ ID NO: 2365 - DNA, 618 bp, Unknown
  Unknown gut bacteria
atgaaaaaaggagacaacaccatgtggatctatctgctgcgccatggcagaactgaatacaacgcccagaaacggtatcagggccagcgggacatcccgcttttgcccgaaagcgcggcccagctgcggcgggcggacttttccccggaggtcgtctacgtgacgccgctgcaacgcacgtcgcagacggcaaagatcctctttccggatgcaaaactggtgccggtggaggggctgaaggagatgaacttcggccggttcgaggggcagaagttcgtccgtgtggagcaggacccggagtatctggagtgggtccggcagaacgaagccagcgctcacccgggcggggagcggaggagcgatttctgtgaccgcgtctgcgcggcgtttgccgctctggtggacaaggcacttgccgatggcgaggagcggctggtcatcgtggcgcacggcggcgcccagatggccgcaatggagcggtttgcggtgccgcacaagacctttcacgcatggtgcggccccaatgcgggcggctatgtgctggacgcctgcgattggaaaacggaacacatcctgcacgtggtgaaaaccgtccagtacacggaggaaaacgcatga

SEQ ID NO: 2366 - DNA, 429 bp, Unknown
  Unknown gut bacteria
aaaaagaccatcaagctggccatgtgctacgcagagggcatcatgctcatcggcttctgcctgttccagtttgcgccggacaagctgctgagcttcttcgccgccagcgacgcgatgctggccatcggcatcccggccatgcgcaccatctgcttccacttcctgctggccggcatgagcatcatcctgtcctccaccttccaggcgctgggcaatggcatgttcagcctcatcgtctccgtctgccgccagctggtcgtcctgctgcctgccgcctggctgctgagccagaccggcaacgtcaacctggtgtggtggtcgtccgtcatcgccgagctggtcagcgtgacgctgagttttgtcttctttgcccgcctggacaaaaagatcatcgaacccatgtacaacaaagctcctgccatgcagtga

SEQ ID NO: 2367 - DNA, 747 bp, Unknown
  Unknown gut bacteria
gggttcacggccacacagggggagggggaagcccccggctccctcagcgccaccgtgatgctgcggttgcgggcatggcggccctaccagctgcaatgtgtggccgatgctttctcgacgcagtttgagacggagcctgtgatgcagaatctccgcaccgaagcgctgctctgtgccctgaacgagacggccaccctgaccgggtccggtccgctgccggatgccggggcaaagatcctggcctgctttgcggccatcggcccggcacagctggtctggcaggaaatcggctgggtggtggcggcgcgggtccttgtgacggcgtttggcgagaacagccttgccgagctggaaagctacgaaaagtcgctggagctggccctgcccatcccggccgaagccgccgagaccgcagcgctctatccggagtgctggctcagcgtcgaggatctgcaatgcagctgcacgggcggtgcgctggatgtctcggtgacggtgcgggtagagggtgccatcctcagccgcaggcaggcttcctgcgtgggcagcattgcgctgggggaaaagctggcccctgccgacccggagatctccctccgcatctattacgcacaggccggggaagcactgtttgccattgcaaaacgctaccatgtttcgccggggcagatgcttgccgcaaacgacctcgccgagggcacaacggccatcgaaaaagcacagcggcttctgattcccggtgcatga

SEQ ID NO: 2368 - DNA, 933 bp, Unknown
  Unknown gut bacteria
atggaactggcacttatctgcgcacagcaggtcatcgtgttgtttttgctcatcggggcgggcgcggccgccatcaagaccggtgtgctgaagccggaagggcggcagaccctctcgaacctgctggtctatctggtcgttccggccatgatcgtccactcctacatgatggacttcagcgaggagatcctgcacaacctgctggccgcgttcgggctgagcgttctggccatcctcatcggcactgtgctgacgctggccctgactgcccggcagaaagaccgccgggcccccatcttccggttcgcatcggtcttctccaacgcagcctatatgggcttcccgctcatttcagcgctgtttgggtcggaggggctgctctacgccagcgcttacgtgaccgtgttcaatatcctgctctggaccatgggctacggcatggtcagcggcagttccagcccgaaggaagtggcccgcagcctgctgcgcaccccggtgctgtatgcgatggtggtgggcctcgccgtctacctgctgcagatcccggtgcctgccctcatcgcccagccgctggaactgctgagcaacatgaacaccccgctttccatgctcatcaccggcatcctcatcgccacgggcgacctgaagcagatcgtctgcgaccggcacatctggaaactggccgggctgcggatgctggtcatcccggcggtgtgtctggcggcctttgcggcgctgggtctgctgcgcttcggcatgagcgcacaggtggtgctgctgttggagtgctgtcctgccgctgcgatcacctcggtgttcgccgttcagttcggccacgatgagcagttcgcggccggatgcgtggtcctcaccaccctgctcagcatcgtcaccctgcccctgtgcgcactggtgctgacggcgctgatgtaa

SEQ ID NO: 2369 - DNA, 795 bp, Unknown
  Unknown gut bacteria
atgaacggcagggaattgtatcccgacgcagaacagcgccgccgcatcatggatttcattatggcggccgggcagacgctgctggaaaacggcgcggaggtcttccgcgtggagcagaccatggagatcatggcgcgcagcttccatctgcgggaatttcatgtatatgtattgaccaacggcatttttgccagtgccggcacggccgagatcagcgaggtgcgcaacgtgcccacacgcacgacccatctgggccgggtggctgcggtgaaccagctgtcccgtcagatcgcagagggcagcgtgaccaccatcgacgaagccgagagccgcctggtgcaggcgcagagcattcccttcccgaagggccgggtgcagcttctggccgggctttcgggcgcgttctgcttcgcgctcatcttcggcggcaccctgcaggccgcgctggtcgctgcggtggcgggctgtgcggccaacgcctatctgctgttctgcgggcggcaccccataggcggcgggttccgcaccatctccaccgcttcgctcatcaccatcctctgcattctgggctgccacctgctccacaccgaggccagccatgccatcatcggcaccctgatgatcctcacgcccggcatcgcgttcaccatgggcatccgggattttgtgcagggcgattatctttccggcaccatccggatgatcgacgcactgctcatcgcagccagcattgccatcggcaccggtctggtgctgggggcctatgccgcatggacgggggtggcggccgcatga

SEQ ID NO: 2370 - DNA, 1053 bp, Unknown
  Unknown gut bacteria
atggaaaaactgcgcaatctcctgctttatggcggcgcgatgccggatgtctaccggaactgccgggacgagatccggaaggaaaacctggaaaagctcttcttctttctcaccgtggagatcgtattcctgctcatagcgctggcggtgtgctgcgccgtcaaatcgctggcaggcggcttcatcgcctacatcattgcgctggctggtgcgctggtactgctgtgcacggtgcagagctgccagaacagcaacatcgccctttccatctgtgcggacagttttctgggcagctgctatctgctgagcctctatctgggctgctttgcctacccggatgaaccggccatctgcttccatgtcgttgcggtggtgctgcccatgctgttcacccgcccggccatcgggaacatcctgcgcacggtgatctatgaagcgctgttcatcggctgttctgtgaccttcaaagacccggccctcgtgcccatggatgtattcaatgccgtcctgttcgggctgatgggctgtgtgctttccacatactatattcgcgtcctgacggacaatgtcgttgcgcgctgcaagctgaaggtcatcgcagagaccgacctgaacacccagattcccaaccgcaacgcctacgagaaccacatgaacgaatatccgctgcgctgttccaacaccctgagctgtgtctatgtggatgtgaacggcctgcacgagctgaacaacaccaagggccacaatgcgggcgacgtcatgctcaagacggtggctcaggagatggtccggcagttcggcatcaaggacagctatcgcatcggcggcgacgaattcgtagcctttgtggtggacgagccgccccgcacggtgcgggaacggatgagccagctcgtggccaatgtagaggccaacggctattcggtcgccgtgggctgtgccacctgcagcgccggcggcatccagctcgaagccctcatcaagcaggccgagagccgcatgtacgacgacaaggaagaacactaccgccgccgcggcatcccgcacgggtaa

SEQ ID NO: 2371 - DNA, 1137 bp, Unknown
  Unknown gut bacteria
atgaaactgaccagacaacaattcttaaaagcgctccccgcctctgcgcttctgctggcgggctgtgcggcaaagcagacagccccggccaacacggaagcgctggtgttcgaccacgcctatccgctggactacgcccggcagttcaccgccgactgctacgaaggcggctctaccctgctgaccctgaccgggtcgggggaacagttcctcgtcctgccggaagatgccgccgaggtggacggcctgcccgccggtgtcacggccctgcgccagccggtgcagaatatctatctcgtctccacctcggtgatggacctgttcctccatctggatgcgctggactgcatcaccctctccggcacccaggctgccggctggcatctcgacgaagccagagccgccatggaggccgggcgcatcgcctacgcgggcaagtacagcgccccggactatgagcagatcctcgcttccaactgcggccttgccattgagaacacgatgatcctccacacaccggaggtcaaggagcagctggaacggttcggcatcccggtggtggtggagcgctccagctacgagagcaatccgctggcccggatggagtggatcaagttctggggcatcctgctgggccgggagaccctcgccgaacaggtgttccagaaacaggtggagcgcatccagccgcttctggaacaggtccccaccggcaagacctgcgcgtttttctccatcacggccaacaacctcgccactgtccgcaagggcggcgactacgtggcccagatgatcgggatggccggggccgattatgtgttctccgacctgaccgacagcggcaataacctttccaccatgaacctcccgctggaggatttctacgccggggcaaaggacgccgatgttctcatctacaacagcaccatcgagggcatggtcgcccccctcgacgagctggtggcaaaatgtgcccttcgggccggcttccgggccgtgcagagcgggaacgtctggtgcaccacccagagcttttttcagcagagcatggagctggccgattttgtgatcgacctgcaccgcgttctgaccgaggacgcccccgacggcctgcaattcctgacaccggtgacgtaa

SEQ ID NO: 2372 - DNA, 522 bp, Unknown
  Unknown gut bacteria
gtgcggcaggcgctgttggaactggaaaggacggaatcaacaatggctgataacaataccctgaattttgacctcgatgcccccgcagtacccactctgacgctggaccctgctcccgctgctgcaccggtggaggagaagaaggaagcccccgcccccgccgcaccggaagtccggctgaccccggaggagcaggcgatggtggattccttcgcagaaaagatcgacatcaccaacagccagcaggtgctgcagtacggctcggcctgccagaaaaagatcggcgacttctctgaagccgccctctccaaggtctccaccaaagacctgggcgaggtgggcgacatgatcaccgacctcatcggggagctgaagagcttctacgccaacgaagaacagcagaagggcattttgggtttcttcaagaagaagggcgatcagctggacaacctcaagaccaagtacagcaaggccgagacgaatgtggagaacatccagtccatgctggagggccatcaggtc

SEQ ID NO: 2373 - DNA, 393 bp, Unknown
  Unknown gut bacteria
atgtattattccagtggcaactatgaagcatttgcgcggccgcggaaaccaaaggacgtagaccgcaagtcggcctacctcgtcggcaccgggctggctgccctcacagcggcctgctatctggtgcgggatggccagatgaagggcgaacatgtccacctctttgaaaaaggggccatccccggcggcgcatgcgatggttatcaataccccggcatcggctacgtgatgcggggcgggcgcgagatggacgatcatttcgaggtcatgtgggacctgttccgctccagtccgtcgatagagaccgagggcgtcagtgtgctggatgagtactactggctgaacaaaaaagacccgaacgtttcactctgccgtgcgaccgaacaacagggc

SEQ ID NO: 2374 - DNA, 951 bp, Unknown
  Unknown gut bacteria
ttgacgcgtaacaacaaaaccactccgaacacgcggacctgggtgctctacgttctcgtcggtgtgctcctcatggcgggggtcgtcctggcctccggctggaaagccctgcatgtgaccgaagagcatttctgccagacgatcaagttcgtcaaatcgcagtccaccagttttgagaagtacaacgataccatcacggccaaaacgctccgccgcacggcggtctcggtgcaccagctggccggtgacgccgcactcgacctctccgacccgcactgcctgaaacagcagaccgagacgctctggctcaccggcatttccgtgctgcgcccggacggcacgctcctgtgcgagtacacagcgaacggcatcggctatgcccagctggaagaccagctcaaaaaggagaccgcgctggacgtcttccgcttcccgcagaagacctacctgaagcgcgttctgctggcagacgggtctgccgtggatgtagcggcacaccgggccgaccaccaggaggtcatcctgctggcctatcgctgcaccccggccaaatttgtcgaggggacggcactgtcggtccagagcattctggacggctacccggaagagaccagcggcaccctgttcatcgtgcagaacaatcagatcattgcgtccaaccgcccggagctgatcgggcaggataccaccgacagcccgccggtgcaggagatccgcagcaccgggcttgcggaaaagctgacgcacacccgcggctggaacggctccggctgctatttcggcatgtacagccacagccagtcgttcgacctctatgcgtacacggatgaaacagccgtgttccacgagtcgctcacgctggtcttaacagcattggtctgttacatcctgctcgtttcgatcttgcagatgctgcgccggcgctcggtgcaggagatggagcagcagaaa

SEQ ID NO: 2375 - DNA, 1200 bp, Unknown
  Unknown gut bacteria
aaccgcaaggcgaagcgtgccggtgccgagccggtggagccgatgtataccgtccaggatgccgaagcggccatcaagctgttccggggcgtggattacaacacgaaactggaactggcccccggccttgagatcgagttcgtggatgtgggccatctgctggggtcggccagcattgcgatctgggtgacggagaacggcaccaccaccaagctcgtcttctccggcgacatcggcaaccagaaccagcccctcatcaaggacccgacctatctgaccgatgccgactatgtggtgatggaatccacctacggcgaccggctccacggcccccgcccggattacatcggcgaactggccagaatattgcagcgcaccttcgaccggggcggcaatgtggtcatccccagtttcgcggtgggccgcacacaggagctgctctatttcatccgggagatcaaggaaaaaggtctggtcaagggccacggcaatttcccggtgtacatcgacagcccgcttgccatcgaggcgacccgcatcttcagggataccgaccccgactgttttgacgaggcgacccgcgccctgctggcccagggcatcgaccccatccagtgccccggcctgcgggtcagcgtgaccagcgacgaatcccggatgatcaacgccgaccgggagccgaaggtcatcctttcggccagcggcatgtgcgaggccggccgcatccgccaccatctcaagcacaacctctggcggccggagtgtaccatcctcttcgtgggctatcaggccgtcggcacactgggccgcaccctcattgaaggcgctaccgatgtcaaactgttcggtgaggccatcgaggtgcgggcggagatctgccagctgaccggtctgtccggccacgcggacaaaaacggcctgttggcgtggatcaacgccttttcgcccaagcccaagcgggtcttcatcgtccacggcgacgatgaggtggagaacatcttcgcccagaccctcaccgacgaaggcttcacggcctgtgcgccctacaatggggcgcagtgggtcatcggggccgagggggccgtctgtgtgcaggagggcaccagagtgcgggtcgagtgtcggcccagtgagggtgccagccgcgccgccacggttttccagcgcctggtcagcgcaggcaagcgcctgctgcgggtc

SEQ ID NO: 2376 - DNA, 972 bp, Unknown
  Unknown gut bacteria
atggagagtcgatacaccagcgctgcccagtgggccgacgcccgcgacggcgtcattccggcaccctatgctctggaagcgggggagagtatcaccgaccgttacctggagccggtggtcttccacaacgaaaacggccccgacatcggtgtgaccacctgcggcgtcatcgtcagggacggcctgtacttcaaggatatggacaacagcggcgagctggccccctataaggactggcggctcagccccgaagagcgcgcaaaggatatggtggcccatctgcgcctggaccagcaggctggccttgtgctgaacaccctgttcaacaccccggtggcccccacccgcgctgcggccactggggccgatggcaagctggaaatgtccaagatctacaagcaccacgacccggacgaaaagcccatccccggcccgctgcccggcatgaccatgagcattgatgacgccgatgtgctggacaagcacatcacggcgggcgtttaccgcggcgatatgcactgcgaggccggtatggtggcactgtaccaaaatgcgggcacccagatgctggaatacgaagcctgcaagggcggcgtggcgattccgtactctctgcacaccaaccccatcaacatcggctacccggactctctgtgcatcggtgcagcggtgctgggagacggcaacgcagatttcgtttttgaaatggcagacactgaccggaagatgatgaaggccgagggcctgcacatcatgtacggcccgcaggtggacgtggccaccgacccccgctggccccgcaccaacggcacctacggcgagcgcaccgatgtgacaagcgacatcaccgaagccctcatcaagggctaccagaacggcgacgacggcctgaacgagggttcggtcgtcctgacggtcaagcacttccccggcgacgccccctccgagaacggcttcgagccgcatgtgccc

SEQ ID NO: 2377 - DNA, 723 bp, Unknown
  Unknown gut bacteria
atgcaggctgcgccgcaaacggtgcggcctgtttttgatagagaggatatttttactatggtactgaaccactttactgaaactgcgaccgttctgaacgccgactgtgattttcaccggaagctcaaacccggcgccctgttccgctatgtggagcaggctgcggcggaccacgcccgcgcctacggtatggacgacgatttctttgccgcccgccacacgacatttctggtgggcaagcaagccgtggaggtctaccggatgcccacccgcggcgagaagatcgcgctggataccgcctgtgagccttgcaaaaaaggctcgatgaagcggattacccacatcctcgacgaggccgggaaggagctggccctcgtggactgccgctggatcgtggtgaacaccgaaacggggcacatcatgcggcagcccagctggtgcacccccaactacgaaaacgaggaggtggaagaggagctgccccagctggtgcacaaatgcaaggagctgaccccggcgggcagctggacggccagctactcgctgtgcgacctgaacggccatgtgaacaactcgttctatctggacatcgcctgcgacgccctgccgctggatgcactccggaagggtccgctgcgcttcgcctccatcaagtaccaccgcgagatcccgatgggggcgcaggtggcggtggcctatgcgccgtcggccgacggctggtat

SEQ ID NO: 2378 - DNA, 1335 bp, Unknown
  Unknown gut bacteria
caactgcgcaacaccccggaaaaatactatcatagtatactcttttttgcggcgttcgtcaatcctgaagtgcgcatcttcacgctcccgctgtttgtgcgcatttttataagaaaatccggttgcaaaggccgaaagggatggtctataatggggttaaaaagcggccaggagctgttcgattgccaaagtgaggagaccggaatgaacgagcagaaaacgcgcctgcggaatgcgggctttgtgactttctttttcagcggcatctgcgccatttccagcggcgtggtggtcagcctgctgcaggaacagtatgggtttgcctacggcatgaccggaacgctgctctcgctgatgagtatcggcaacctgctggcgggttttctgaccggtgtgctgccaggtgtgctggggctgaaaccaagcatcctgctgctgaccatcgggtacaccgtcggctacgggatcatgggctttaccggggcagaagtcctgctggcggcggcgttcttccttgtgggcgttgccaagggcagcgccatgaacgcctgcaccatcctcgtcagcgacaactccgccgaccgcacccgtggcatgaacctgatgcacagctgctatgcctgcggtgcactgctctgcccgttcctcatcgcagcggcggcgcgggtcagcaccgcactggcggtgttcctgctggcggcgctgggcgtggtgctctggctggtctactggaagaccccgatggaaggtaaggtcaaggaccggaaagcggccatcgactggagctttctgcactccggccggttctggctgctgacgggcctgctcttctgccagaacgcggccgagcagagcgtgactggctggatggtgacgtatttcaagggcagcggcatcattgcgggcacactggctgcctataccgtgaccgtgatgtggggggccacgctggtggcccggctgctcattgcattcgtgttcccgttcaagtccccgcgcaaggcgatggtggtcatggctgtgacctgcaccctgttctatgtgctcctgatgcgggccgacagccagccggccgcgatcctgctgctgttcgccttcgcgtttgcgatggcaggtatgaaccccactgcagtggccagcgcgggcaggatgaccagcgtgaccagcatgggcatcatgctgcccgctgcgtccagcggtgccattctgatgccctgggtcatcggccgtgtggcagagcgcgcgggccttgccgccgggatggcgatgaacatcctcccctgcatcgggctgtgcgtgtttgcgctgctggtcgcccggatgaaggaagagtga

SEQ ID NO: 2379 - DNA, 420 bp, Unknown
  Unknown gut bacteria
ctgacgctgaaccccatgttcggtgccgccgcgatgagcctgtccagcttctgtgtcgtcagcaacgcgctgcgcctgaatctgttcgacctgcacagcaccaaacatgaccacaagatcaagacttccgccctgcccgctgccgcgcagccgcaggctgaagatacgagcgaacccgtttcggaatccactgtcaaggaggaatgttccatgaaaaagaccctgcacgttgaaggcatgatgtgctgccactgcgaggcccgcgtgaagaaggcactggaagctctgcccgaagtccacgaggccgtggtcagccacgagaccggcaccgccgtcgtcaccctgagcgccgatgtcgccaacgagaccctgaagaaggccgttgaagaccaggactacaaagtgaccggcatcgaataa

SEQ ID NO: 2380 - DNA, 690 bp, Unknown
  Unknown gut bacteria
atgtgcggctttttgtatgctggtgccgacctgtgcggcttcagctctgacaccacgccggaccttgccctgcgctggctggaattcggcctcctgacgccgctgatgcgcaaccactccgccatcgggacccggatgcaggaatactacctcttccctgagatgctgcccgccatccgccggatgctgcacctgcgctacgccctgctgccctacctgtacagcgaattcatgaaggcagcgcttgaaaatggctcctacttccgcccgctggcctttgattaccccgccgaccccgacgcccgcgaggtgcaggaccagcttctgctcggcgaagggctgatggccgcgcccatctacacccaaaacgcccatggccggatggtctatctgccggagcccatgaagatgctccgcctgcgcagcgtggacgactacgacgaggaagtcctccccgccgggcaccactacctgcgctgtgcgctggatgaggtgctgctcttcctccggcccggctgcatcgtgccggtggcagcaccggccgacaacaccgctcagctggacgacacgcagttgaccctgtggagttatctcccggacggaggctctgccgcctaccggatgtacaccgacgacggcttcaccaccgactacaacgcgccggagcactggcggctcatccggagctga

SEQ ID NO: 2381 - DNA, 804 bp, Unknown
  Unknown gut bacteria
ctcacgccgtgcattcctgaacggatgcaccctgctggcggcctcggcggcctgactgcctgcggcggaacggacgcgacggacagcgatctgccgcagatcctcatcggaagcgacacctacccgccctatatttatctgaacaatgacggcaccccggccgggatcgatgtggagatcgccaccgaggcattccgccgcatgggatacgctgcacgatttgaagtcatcgactgggagcagaagaccgcccttgtggaaagcggcgccatcgactgcatctggggctgcttttccatgcagggccgcgaaacgctctaccggtgggccgggccttacatggtgagccgtcaggtcgtggccgtgaacgccgacagctccatccagtccctcggcgaccttgccgggaagaccgttatggtgcagagcacctccaagccagagagcatcttcctcagcggctccgacccgcgcatcccgcagaccgttgaggtgttcagcatcgaagaccgcagtgtgcagtatgccatgctggcctgcggctatgtggacgccatcgccgcccacgagacggccatcctgcaatacatgaaagacaacaacgctgcgttccgcatcctcgaagagccgctgctggtcaccgggctgggcgttgcctttgccaaaaatgacagccgcgggctggaccaccagctgaacgataccttcgcgcagatgcgcgaggacggcacactggaacggatcgtcggcaaatacctggaacatgcttcgcagtatctggaggtggacaccattgacgcgtaa

SEQ ID NO: 2382 - DNA, 906 bp, Unknown
  Unknown gut bacteria
atgagcagcagagaaaaacagggttttggaatctactttttaacggcattcggtctggcctggctgtgtcaggtgtatgcaagcatgcagctccttcagggcaatgctgcggtataccgtgcgctgctgtccgtgagcatgttctgccctctggcggccgtgcttgcggcgaaaaaagtctatctgcatcagcccaccggcatcggctggaaggtgcagggcaagcgccgctattggctggccgcctggtttggcccggcagtgttcaccgtgctggcagcggtgctctattttgccgtgttcccgcatcggctggacgtttcgggcagctggctggtggcggcttacggcggcgagatggacgcccagactttgaaaagccagctgggggtatccaatgtcagctacatgttgcagaccggcctgcttgccgtgacgctggctccgctcatcaatatgttctttgccgtgggcgaggaagccgggtggcgcgggtatatgatgccctgcctgaaggagcgatttggcctgctcaatggccgtctgctgggcggtgtcatctggggcgtctggcattggccactgatgctgctggtgggttatgagtacggcacggactatctgggcgcgccggtactcggccttgtggtatggtgcgtgttctgctttgccatgaacagtctgctggatcttctctatgaaaagaccggctgcatctgggtgccggccatcgcgcatggtgcgttcaatgcagttgcagcgctgttcacggtgctgacttacccggcagatgcctattataatgtgctgggccccacgcccattggtctgatcgggctgttgccggtgctggcagcagccgtttggctcacgctgcgcgagatgaaacaggaagagaaaagctga

SEQ ID NO: 2383 - DNA, 981 bp, Unknown
  Unknown gut bacteria
atggcagaaccgaccatcagcatcattgtcccggtctataaaacggaagcctacctcgaaaaatgtgtggattccattctggcgcagaccttccgggactttgaactccttctcatagacgacggctccccggacaactgcccggcgctgtgcgaggaagcagcaacgcgcgacccgcgcatccgggtcatccaccagaagaacgccggactttccgctgcgcggaacaccggggtggaggctgcgcgcggggaatgggtcggttttgtggacagcgatgacagcatcgccccggagatgtacgagacactgctcatctacgcccggcgggacggggcacagatcgcggtctgcgattacctgctggtgacggaagccggagaaccgcttccatcgtcgtatcgtctggaggaagacaaggtgctcgaccgtgtgggggcgctggaacagatgaaccggggccacttcaaagtggcatggaaccggctgtaccggcgggagctctttgaaacggtgcgctttccggtggggaagatccacgaggatgaatacacggcgcatcagttctactggcagtgtgaacggatcacgattgcagcaaagccgctgtatttttatgtgcagcggggcggcagcatcatccataccgattcgccccagaaaacgatgaatctggcagaaggcattttccagcgggcctgcttcgagcaggagcagcagctcaccaggcttgccatagaagcagccaagacgtcgatgctggtgtttgcgcaggcccacaggcagaaggacctgcagccggcgcagcggcggtggtgcgcagagatgcgcggccggatgaacgcgctggcaaagaccctgctgaaaagcgggagcggctcgcgggccgaccggatcaagttccggctgttcctctgctctccaacgctgtaccgcgcggcgctgctgaccaaaagctggatgaacaagatcggtttctga

SEQ ID NO: 2384 - DNA, 936 bp, Unknown
  Unknown gut bacteria
atgatcatcaaacatgcaaagatctataccccccgccacacgttcgaggagggggacctgttcatccgggaggggcgcatcgtgccctttgcgcagccggaagcgggcgaagaagttctggatgccaagggtgcctatgccctgcccggccttgtggacatccatttccacggtgccatgggcaaggacttctgcgacggaacggaagaggccatccagacgctggccgactttgaggccagcaagggtgtgctggccatctgccccgcgaccatgaccttctcggaagagatcctgaacggcgtcatggatgcggctgcggcccaccggaacggcaagggcgcggaccttgtcggcatcaacatggaaggccccttcatcagcccgaagaaggtcggcgcacagaacccggaatacctccatcctgccgatgtgggaatgttccgccgtttgcagaagcgcgcgaacggcctcatcaagctggtggatgtggcccccgaagagccgggtgcgctggagttcatccgggagtgctgcggggaggtccgcatctccatcgcccacacctgcaccagctacgataccgcctgcgcggcttttgacgccggtgctacccacatgacccacctctacaatgccatgcccggcatcacccaccgcgagccaggccccatcattgcggcgctggagcgcggcgcagaagtcgagctcatcaccgacaatgtccacatccacccggccatggtccgcttcaccttccgcaccttcggcgacgaccacgtcatcctcatcgccgacagcatgatggcctgcggcctgcccgatgggcagtacagcctgggcggacaggcggtcacggtcaagggcccacgcgccacgctgaccgaacagcccggcaccatcgccggaagcgcgacctgcctgtacgactgcatg

SEQ ID NO: 2385 - DNA, 1260 bp, Unknown
  Unknown gut bacteria
gtgcacaagctccccgtcaggcagcgcctgctcctcggttttacgctgttttcgatgtttttcggggccgggaatctgatctttccgccccatctcggcgcacaggccggttccaacttctggcctgcctttgccgggttcgccgtcagcgccatcggcctgcccatcgcaggcgtggtggccgtggccagagcgggcgggttcgaccagctggccagccgggtccacccgaaattttccctcgtgttcaccattctggtctatctctccatcgggccatgcctcgccatcccccgcacggccagcacctcattcgagatgctggtgcctcttgtgggcggcgggcgcggcctgcagctgagctactccatcgttttctttgcggcggcgttcctcgtggcgctccatccggaaaagctcaccgaccggctgggccgcgtcctctgcccggccctcatcacgctgatcttcgtcctgttcgcaggctgtctgctccacccggtggccgcgcagtacggcccccctgccgccgcctatgcccgcctgcccgcatttgaaggcattctgggcggctaccagaccatggatgcccttgcggggctcaatttcggggctgtcctcgcactcaacatccaggccctcggcgtcaccgaagaaaacgccatccgtcagaacaccatccgggcgggcttcctcgcgggcgggctgctgctggtcatctacgccatgctgggccatgtgggcgcgctgaccggtgccgccgcgtcggactgcaccaccggtgccgaagtcctctctgcccttgccagcgccctgttcggccgggccgggcagctgcttttagcggccatcttcctcatcgcctgcttcaacacctgtgtggggcttatctcctgcgtggggcagtatttccacaccctgctcccccgcatcccctacccggctctcgcgggctttttcgccgccgccagtatgctcatctccaacatcgggctggcgggcatcatccggctgtccaccccggttctgggcgcactgtatccggcagccatcgtgctcatcgcgctgtcgttcctgcccaaagcgttccagaagcggagcgtctatgtctgcaccgtcacactgacggccgtgcagagcgttcttgcggccctgccgttcaccgcagctttcgtcaccgccctgccgctgggggcctatggcttcggctgggtcgtcccggcagcggcggggcttctggtcggattcctgttcccatga

SEQ ID NO: 2386 - DNA, 867 bp, Unknown
  Unknown gut bacteria
atcctgaatgcggcgggcaactcccagcggtcgctgctctatctgggcatcgcatcgggcacgaacatcctcctcgacctcgtgctcatcgcggggctgcggatgggtgtggccggtgcggccatcgccaccgacatcagcccgctggtttcctgtgtgctggcgctgcgctttttgatgcgggtccaggacgactaccgcgtgacagccagagagatccgggtgcacggcaaaatggccgtccgcatcatcaaggtgggtctgcccaccggcatccagaatatggtcatctcgctgtccaacattctggtgcaggccagcgtcaacggctatggtgccgccgccatggccgggttcgcggcctatatgaaggtggacggcttcaacatcctgcccatcatgagtttcagcatggcggccaccaccttcgtggggcagaacttcggcgcgggcaagctcgaccgcgtgaagaagagcctgtgggtcacgctgggcatgggcgtcgtctacaccatcctcaccggtgtgctgctgctggccttccaggaccccatcatgcacctgttcacccacgaagaggatgtcgtcgcctttggctgcacggccatgcactacttctgccccttctactgggagctgagcatcctgcacggtctggcgggcaccgtgcgcggcaccggcaagaccattccgcccatggtggtgctgctggtctcgctgtgtgtgttccgcatcgggtggatccagtgggtgctgcccttcttttccagcatcgacggcatcttcctgctgtatcccgtctcgtgggggctgggtgcgttgatgatggtgggttacgcatggaaagcaaactggctggaaacttaa

SEQ ID NO: 2387 - DNA, 885 bp, Unknown
  Unknown gut bacteria
ttgaaacgacgacacttcctgtcgcttgcggcctgctgcctgctggggctgctgccggggtgcagcttccccatgacggacaacatgcaggtcgaggatctgctgcgcgctccgcgcctttcgggcgattacggtgcgctgcaaagtgccctgaacgactggctgggcgcgcgtgcgcagctcaaataccccatgcagggggagttgctttcgcccttcctgctgcaggatctggacggcgacggcgaacaggacgccgccgtgctctacactacggcccagtcctccaacgtctgcatcgcctttttgcagaaggatgccgcaggcgcatggaaggtgcagcagaccatcgagggtctggctgacacggtggacaatgtccggctggcgcaattgcaggacggaaacgctgtgcagctggtggtgggctatctggccgcgcagggtgacagctatctggccgtctattcctacgaacatggcgaggtgaacgccattctggagcagtcctacgagcagtacctcgtggaggacatcaccggcggcggcaacgaggacctgatcctgatgtccacgctggaggacggcggagtgcagatcgagctgctgaccgtgaaccgggacggcagcttccagcaggtggccgtcatgggcctgtcggcggacaagttctccggctgcgcctcggtggcgtcgggcctgggagcggatggtcggcattatctggtgctggacggctggaccggcatttccggcaacaatctggctacggtgctcctgcgtttcgatgaagagagccagcagatgatcccggccgagcagatcagcgccagcgcgctttacagcgcctcgctgcgcaatgtgccgaacctcgtcagccgtgac

SEQ ID NO: 2388 - DNA, 627 bp, Unknown
  Unknown gut bacteria
gagacgagcttgcagatcgacccccggatgatccgttgccagacctgcgtcagcgcctacatcggcatggcgtttctctgcggcggaaccgtcacggaccccaaaaaagaatacaacatcgaatttttaacgagccgcaccaatcttgccagagactttgaagcgctgctggccgagcacgagtttgcgccccaccgcacccgccgcaacggcgtgaacctggtttacgtcaagagctgcgccaacgtggagcgcattctggcgtttatgggggcggcccaggcggcagcgcagatcaatgcgcagaaggccgtcaagcagatgcggaaccagatcaaccgccacaccaactgcgataccgccaacctcggcaaaacagcccgcgccaatgcgcagacgctgaaggccatccgctttttgcaagagcagaatgcgctggagaccctgccggaggtgctgcagcaggcagcggccaagcggctggaaaatccggacctctcgttgacggcgctctgtgcctgctttgacccgccggtcagcaaatcggggctgtcgcatcggatgaaaaagctggaactgctggcgcagaccatgcgggaacggatggaacaggaggaaacgaagtga

SEQ ID NO: 2389 - DNA, 543 bp, Unknown
  Unknown gut bacteria
gtgcagcgcagaaagaagggcaatgatatgggcttttttgataagctgttcggcggcaaggatgcagccgagacgaaattcaagggcgaaaagaagacggtgatgatgccgctggcaggcaaggtcatcccgctggaggagctgccggacgaaacgttcgcatcggccattctgggcggcggctgcggcatcgaacccacgggagataccgtttacgcaccgtttgacggcaccgtcactcaggtgcccgaaagcctgcacgcggtgggcctgatgagcgatgacggcattcagctgctcatccatgggggcatggataccgtggaggtgaagggcaacggcttcacctctctgacgaaggaaggctccaaggtcaaggcgggcaccccgctgctcaaggtcgacctcgacgccatccgcgccgccggtcatcccacggcaacggccatcatcgtgaccaacggcgacgacctgtccgaaatgtcggtcgtggcctccggcgacaccgccatcggtgtgccgctgctcaagttcaaggcataa

SEQ ID NO: 2390 - DNA, 1071 bp, Unknown
  Unknown gut bacteria
atgttactggatatcttaccattaaaaaacaacacggcccgccttgtccgggcctatggggaggccccctgcatcgccctgccgtcggtgctgccggccccggagggcggcagctgggctgtcaccgaactgggggactactgcttctccgaatcgccccggaacctgcccgccccggacgcagtctgccgctacgcagtgggggaagacggcagcgccgtcctgaccagagcttttggccgggaccggaccgggcggcaccgccgctatgacctcgactttggcgctgcgcccgaagaagacctccaccccgtctgcgggaacttcctcgaagaagccgtcctgccggacagcctgcgggtcatcgggagctgcgcgttctacaactgccgcaggctgcgcaccctgtccgtgggggcaggggagctgaccgtcggcagcgatgtctttttgaactgcttcgcgctggcggacctcatcgtccgggccgacccggagcaggccaccggcctgttcgcgctcgtcaacaacatcaccgaggccgtgcgggcgctgttctggtaccccggcgaggcggccccccgcgcaggcctgtggtacccggcctactgggaggatgtggaggaatccccggcgcatatcctgctgcacaccttttccggacagggatatcattaccggcagtgttttctggacggaaaaatcctctgcgcagaatacgacgccattttcccggacggccacgcctccgaggacaaggatatcatggccatgctctgcttcgaccgtctgcgctggccctggggcctgaccgaacaggcaaaggacccctacaccgcgtttctcaaggcgaacacgggccgggtcgtggcccggctgctgaaggcgcaggaccttgacagcctgaaggccctgctggcgctggatgtgctggacgcggccgggtttgacgaggccgcagcgctggccgttcaggccgaacaggctgctgctgcggccctgctggccgatgccgcctacagcagacaggccgcaaagccgaaccggaaacgctatgattttgacttttga

SEQ ID NO: 2391 - DNA, 1065 bp, Unknown
  Unknown gut bacteria
ttgttccgtatcgcttccgtcaaatttcaaaaagcattgagcggccgcacccgtgccgccgccccccgtgtgctggcgttctgcgtcatggccgtgagcctgttgttcacgctggccgtgaccgccgcgaatctgcggctgacctacgtcactgactcctatggtgcgcggcagctggtggtcagcactgacgctgacagcgaccccgcccgcgtgatgagcctttccggcatggaggccgaagagggcgaccatgtctattacaccgcgttcagcggcagcctggcttccctgaacatcgagcgcgcattcaccgtgaccatccaggccgacgaccaggagtatccggtgaagatggcctttggcaccgttgccgatgcgttggaacgcgccggcatcaccctggatgaagaggactacaccgagcctgcactggaccagctggtcacagcaggcagcagcatcgtggtccaccgcgtcgattatcaggataaggtcgagacgcaggccatcccctacgataccgagtatgtctacaccagcctgtacttccgcaacaccggccgcgccaccacgttacagcacggctcggagggccagcaggccgtgaccacccgcgagcgctgggtggacggtgagctggaaaacagcatggtggtcgatgtgaccaccacggtggagcccaccaatcatgtcgtcaagacctacggtgccggtgcgcctgtctcgccgctgaccggcacggacggcaccaccaatgcgcccgcttcctacagcagggtcctcaccggcaaagccaccggctactattccaagtccggcaagggctcttccggtctgggtctgggctacggcacggtcgccgtggacccggacgtcatcccctacggcaccctgctgtatatcacttccaccgatggccgcttcgtttacggctacgccatcgcgaccgacaccggcatcgccgttcagaagggcgagatcctcgtggacctgttctacgagacctacgccgagtcggttatcaatggggcgatccaggtcaatgtttacgttgtgaactga

SEQ ID NO: 2392 - DNA, 903 bp, Unknown
  Unknown gut bacteria
atggacgagtattatcaggtggttcaatcgctgccgagctggctggcccggccgcttctggacatgccgtcggcccttgcgcccgatgtgcaggagcttcggctgcgggtgggctgtgcaccagcgttcacgatgcgcggggcagtctgcacaccgcaggaaacagcgcgggagcttgcctccttgcagcggatgcttctgacgccgcagcagatggaggagatcttgttcacactgtgcggcgggtcggtccacacgcatcagacggagacccagcagggcgtagtgacgggtccaaccgggtgccgggcgggccttggcggacgctttctgcaaagcccggaacagggcgtcgttttgcaggaactgacctccgtcaacctgcgcattgcgcgggagaaaaccatcccgctcccagaggaactgtgtgcagccttgcagacgcatttcatcgggatgcttctcgtaggcgagccgggcagcggcaaaacgacgattctgcgcagcatggcgcgggagcttgtccgccagaaaaagctggtctcggtgatcgacgagcggcgggagttgttttcgggcagctcccggcggaagtcccccggtgaagcgctggatgtgatcgccggtatcccgaagggacaggctgtgcagatggcgctgcggacactctcgccgcagatccttttgttggacgagctgggcggtctggatgaggtgacagcgctcgaacaggggcttttcagcggcgtggactttatcgcaacgctccatgcagcgtccccggaagaagcggtcggacgcccccaggtgcaggcgctgcaggcgcggggtgcactccatgtgctggtctggctcaaagggcgggcggagccggggcaggtgcgggaggtgcggtttttatga

SEQ ID NO: 2393 - DNA, 936 bp, Unknown
  Unknown gut bacteria
atgaaattggaacattttgggatgccggaaccgggcgactgccgggtggtcttttcggccagtgccgaggagctggaagcagcggtgcaggccgagcaggcggcaccggatgcgcccaaagaggaagaagacctgctgacggcagcggtgaaccgcgccattctggaaggcttttcgccgctgttcgcgcagctgatggaggagcaccggctcgtcccggtgaccgacccggactttgagctgctggccgtcaaccgggccgaagggttccgggcgggggcggagtttttctgcctgccgccgctggagctggggcagtacaccggctttgtgcagcccatccggccccggcccatccggaaactgacccttgaactggagatcaaccgccaccacggcgacgaggaccgcgccgccgacgaggcgggcaaaaaagccctgcgggaccgtgtggcacgggaaatctacaagacccgctgcgcccaggctgagacgctggccgagcgggagctggtctaccagctcggcggcgaggtgaagggcacgctgccgaagcaattggtggcgggcaactactttgccgagcagcgggagttcaacctgcggatgcaggcaaacaacatcaactttgaccaatacctgaaggtgcagggccagacggtggaacagttccgggcggagcttcacgctcaggcggaacagaaactgcgggggcgtctggggcttctgctggtcgccgaaacggaacatctctggcccacagaggccgaggtgcaggctgcgctggagggctggaacggggagcggaccttcccatccaacgacaagcgaaagctgcggcagggcattgccagccagcgcgcagctgcctttgtgcgggcgcactccacgctgaccccgccgccggaggagccagtggtggtcgaggcggtctga

SEQ ID NO: 2394 - DNA, 306 bp, Unknown
  Unknown gut bacteria
aacaacttcccggcccagctttcgggtggcgagcagcagcgcgtctccattgcgcgcgccctcgccaaaaacccgaagctcctgctctgcgatgagccgaccggtgcgctggactacaagaccggcaaacaggtgctggccctgctgcagcgcacctgccgcgagacgggccgcaccgtcatcgtcatcacccacaacacagccctgacggccatggccgaccgcatcattcaggtgaagagcgggcagatcctgtccaaccaggtcaacgagcaccctgtgcccgtggaacagatcgagtggtga

SEQ ID NO: 2395 - DNA, 1281 bp, Unknown
  Unknown gut bacteria
atgaaaaaaaccgaacagagatacaaggcataccttcagatcttaaaagaggagctgattccggcgatgggctgcaccgagccgatcgcggtggcctatgccgccgcagtggcccggcagacgctgggggaactcccggaccgggtgcgggtcgaggccagcggaagcatgatcaagaatgtcaagtcggtcatcgtgcccaacaccgataatatgaagggtctggaagccgcagctgcggcgggcatcgtggctggccgcccggagcagaagctggaagtcatcgccgatgtgacaccggaggagacgaaggccatccgtgcctatctggagcaggccgatgtgaaggtcgagcatgtggaaaacggcgtcacctttgatatcatcgtcacggtctggaagggggcgcacaccgcgcaggtgcgcatcgcggtcttccacaccaacatcgtccgcattgagaaggacggcgaagtcctgctggacctgcccgtccacggcgacgaggaggagaacctgaccgaccgcagcctgctcgacatggagcacatctgggattttgtccattcggtggacatcgaggacgtgaaaccgattttagacccgcagatccggtacaacatggccattgccgaagaagggctccggggcgattacggggccaacatcggcagcgtcctgctggacatggagggcaatgatgtgcgggtgcgggccaaggcttacgcggccgcaggctccgatgcccggatgaacggctgcgagcagccggtggtcatcaactccggcagcggcaatcagggcatcaccgcctcggtgccggtcatcatctatgcgcgggaactcaaggtgagcgaagagcagctgtaccgggcgctcaccctctccaacctgaccaccatccacgaaaagacccccatcggccggttatccgcctactgcggcgccatcagtgcgggcgcgggggccggtgcgggcatcgcctatctctgcggcggcgggtatgaagccgtcatccacaccgtcgtcaatgcgctggccatcgtgtcgggcgtcatctgcgatggtgccaaggccagctgtgcggccaagatcgccacggcagtggaagccgggctgctcggctataatatgtacatccggggccagcagttccgcggcggcgacggcatcgtcgccaagggcgtggaaaactcactgcggaacgtgggccgcctgggcaaacagggcatgaaggaaacgaaccgcgagatcatcgacatcatggtcgggtgcaaataa

SEQ ID NO: 2396 - DNA, 573 bp, Unknown
  Unknown gut bacteria
atggaaaacgaaaagtatctgtttgtggtatccggtgcagcgggtaccggcaaggacagcgtggtcaatgcactgcgcgctgcgcacccggagatcgagaagaccgtctccgccaccacccgttcgccccgccccggcgagcaggagggcgtggattactactaccgcagccaggagcagttccagcagctcatcgcaaacgatgaggtcgtggaatacaatttctacaacggcaattactacggcaccctgaaagaggaaatccacaagcggctggaagccggcaagctggtcgtgctggtcattgatgtccacggcgcggccaacatccgccggatgttccccggtgccaccaccatcttcctgctgccgccgtcggtggaggagctggagcgccgtctgcgcggccgcggcactgagaccgaggaaagcatccgtgagcgtctggctacggcccggaacgagctggcccagcaggacgacttcaccctgaagctggtcaacaatgaggttgccgcctgcgccgatgcgctctatcaggtcatctgccagcgggcgggcctcgcacactga

SEQ ID NO: 2397 - DNA, 1710 bp, Unknown
  Unknown gut bacteria
gcggtgcgctgcttcgacctgatgaaggagaacaacgccctgctgggggagctggtctacacgcgggacgcgaaaacgttgtccgacagcgacatcgccgagctggaagaggcggcgggcaggctgttcaactatgccaacagcggggactgcggcgtggcctacaagatccacgagctgctgctgaaggcggcccgcttccgcgacgatgtccccatgatcgtccgggagctgtactacaacggcatcaccctgcactatatcaatgtgcgggatgaggaccacgacgtcaacctgctgtggccgcgcatccatgctttctttctggagggggccaactacattgcccggtatgaagagctggacaaggagacccggcagtacatcatccggtgtgtgggcaacatccggctggaggtctcgcgcaagacgaaagaggattgccatcggtatatggaactgttcgacctggctatgggcatcatcacatcgccctattaccaggagctggacccggacatcccctgggcacggttcacctattccatgcacctggaccagataaccctgatggcctatctgcgccattgcaatgaccctgaggtcgcagagcgggtgctgcggtcggcctcctatgtctacgagcatcagaaaaagaacgcaggagaggaatcccgccagcagaactggcgggtgagctacttttaccatgcggcactctaccatgccggaaaaggcacggcccgcgccgtcgtggaagatctgctggagatcatcagccagaccggcgaacaggattattcgccggacggcatcaaccgcaacctgaccggtgcggcctatctcttttattatgaagcatttttgagcgagcaggaccgcgccgagctggctgaccgcattgcaaaggagcgggcggcggcccaccggtatctggacgagatgccgggcaatgaatacccccgcgtggccagcgttgccatccgggaactcatcacggcgcagtcggataccaaggaaatagacaaccgcaagatcctggagagcattctctccggccacaagccgacctatgtacactccacgatggtggcgcacctgaccagagtgctgctccggcggatgatcgagaccaatcccgccgccctcatcggcctgctgggctgcaagaccgcagccgaagtgcaggcccggaagccggagctgctgcacaccgactatgaatgcggactgtaccacgatgtgggcaagagcgcggtcatcatgtacatcgacaccaacagccgcagcctgctggaggaggaattctgctgcatccagagccacccgatcattggctgcagtctgctgcgggaggccgggtacgaagagcatctggccccggcggcgctctatcaccactgcttctacaacggacagggcggctaccccagagatgtgccgccctgcccgcaggacatcaagggcatcgtggatgtgctgaccgtggcggacgcgctggatgccgcccccgacaacatcgggcgctgctacaaccgggccaagcccctgcgcacactggtgggggagctgcaggcccagagcggcacccgctatgcaccggacgtggtggcgctgttccgggacgagaccttctgcaaagtgctggcccaaaagctggatgccgagcgaaaaaaggtctatctgcacgcataccacgctgcggaataa

SEQ ID NO: 2398 - DNA, 393 bp, Unknown
  Unknown gut bacteria
atgaagaaacacatgagccggagcaccctcgtgatggtgctgctggatatcgttctgggtgtggtgctgtcgctgtatatcgccaacaccggcacgatgcctgccgcagacaacgcggccacctacaccgacggcacctacacggcgagcgccaaaggctgcctgagcgatgtggcggtcaccgtgaccatcaccggcggtaaagtgacgaatgtcgacattgatgcttcgggcgagacgccggaactgggcggcaaggcggcggaaagcctgacagccagcctgaaagaggcaggcagcaccgccggtgtggatgccgtgaccggcagcaccatgaccagtgacgcggtctttgccgcaatggatgattgtctggcgcaggccgcacagtga

SEQ ID NO: 2399 - DNA, 882 bp, Unknown
  Unknown gut bacteria
atggaaacatctgcggaaatgaccctgcgggaaaaggtgatgaagtacgtcaagcagtatgtcctcatcacactgagcatctccatcatgtcggtgggcgtgtacttcttcaagttccccaacaacttcgtctttggcggtgtgaccggtacggcggctctggtggccaagctgaccccgatgtcggcctcggctttctcctcagcggcgaacctcgtgctgctggtggtgggcctcatctttttgggcaaagagtttgccatgaccacgggctatgcgacctttgtgatgtcggtggagctgatggtttttgaaaagatttgccccctcagcggcccgctgtccgaccagcccatgctggacctgctcttcgccattgcgctgccggccatcgcctcggcactgctgttcaatgtgggcgcgtcgtccggcggcaccgatatcatcgccctcatcgtggaaaaatacacccacatccacagcatcgcggtcgcactgttcatcaccgacctgttcatggtcatcgcggcttgcttcgtcttcgacctgtacacggcgctctattccttcgtaggtctgacggtcaagtcgctggtcatcgacgctgtgctggaaaagatcaagatgtgcaaggccatcctcatcgtctgtgatgaaaagaaacccatctgcgattttgtcatgcgcaagctgatgcgcggtgcgacctatacgccctgcttcggtgcctacaccgataagccccactacatcatctacaccaccctcacccgccacgaggccgaccagctgcaggagttcatccacaaagagcatctgaacgcattcatgtccatgctgagcaccaccgaggtcttcggcaagggcttcaaccacgcataa

SEQ ID NO: 2400 - DNA, 513 bp, Unknown
  Unknown gut bacteria
ccggcgggtccggcccgctgttgggagtatttcgttatggcttatgtgatctttaacctgctgtgtgtggcagtgctcatcggcatcgaccagggcatcaagttctgggcggtgcatgtgctgatgcccgtgggcactctgccgctcatcccccatgtggtggagctgcggttcgtgctcaaccagggcatggcgttcagcctgctcagcggcaggcagctgtttttgatcgtggccaccagcgctgcgctgatcctcgtcgcatactggctgtttttccgcagccggaacaatcgcctgcagcaggcggcgctgatccttgtgctgggcggcggcatcggcaacctcatcgaccgtgtgctgaacggcgaggtcgtggactacatcaacctgctgttcatgcggttcgccgtcttcaactttgcggacatctgcgtctgtgtgggtgtggcgctctgggtgctggtcatctttttggaggagctgcactccggtgacgcaaaggagccgtga

SEQ ID NO: 2401 - DNA, 945 bp, Clostridium clostridioforme
tccaattacagcatcaactggcaaaaaggagataccccttgtgacctggtggttatagatggcgcttcttttgctgaacagtttgttacaaaggaccttatatatgactttgaccaggaccttaagttttttgatacatattctaaggataagttcattccggcggcactggagatggcgaagcttcatgataaacagtatgtaatccctgtcattcaggaagtgacagctattaacataaataaggcgatgtttaaagacgcaggtcttgtggatgaaaacggcggggcattggttccaaagacatgggatgatgtttatgaatttgctaagaaactaactaagacagagaatggtgttgtcacacagcagggatgtactattcagtggagcaaggatatacatgggactgtattaggaatacttcaggcatcctgcggtggactgtatcaggatgacggcattacggttaactttcagtctcaggaatttaaggatatactggcaatttggcagaaaggggttaaggatggagtgttctctaccgagacatttgctgactacgatgcaggtaagaacagttataaagccggtaaggctgccatgcttcttcagtcaggttccaactgggtagaggcgattccgaccattggagaggaaaatgcgtctgttgttcccataccagggggagaagaaaatggatcggttggatatgtaaatggcgtcattattcccaagtgttctccaagttctgatttggcagtacagtttgttcaggagcagcttctgggcgaatatacacagaccagtaccgtgaaccagtatggtaagattcctgtaattacggagtattacaataagacagaatcacctaattggcagaacattaaggggtccattgaaaaggcagtcacctatcctccttataaagatttgggggaattt

SEQ ID NO: 2402 - DNA, 1305 bp, Clostridium clostridioforme
atgtctattgcagttcaggtagccattgtcatggtcatattactggtcgttatgcttgcagcgggcatacccattggagtaggcatcggtctttcctctgctgtttctatgatctgtatgctaccaggcaatgttgcttttgccacatccgctcagagaatttttgcaggctctaactccttttcactgatcgccatcccgttttttatccttgcaggaaatatcatgaataacggcggcattgctctgcgtcttgtcaattgtgccaaagtattaggtggaaaaatgcctggttccctggcacaggccaacgttatcgcaaacatgctctttggcgctatcagcggttctggcgctgctgctgcggcggctatcggaagtaccatgggccctctggaggaaaaagaaggttacggcaaaaattattccgttgctgtcaatgttgcctccgctcctgtaggaatgctcattcccccaagcaataccatgatcgtatactctacggtagccggcagtgtttccattgctgccctgttcatggcaggctatattcctggtatcatctggggtgccggcgtcattatcttagcaactattgcagcaaaacgattaggataccgcagctccagcgagctgacccttaagatcgctttaaaaacattttggcaggcagtaccaagtcttttgatgatcgtcatcgttatcggcggtattttaggcggtatctttactgctaccgaaggttctgccgttgctgttgtatacgctactgtgctgtcccttatctatggttctattaaagtaaaagatatcccaaggatcgttctggattctgctaagatcactggtaccatcacattcatgatcggcttatcctctatcatgtcctgggcgatggcttttacgggaatcccggatatggtagcaaccgctgtcctcagtgttacaagcaataagtttttaattttccttcttatcaatgtgatcttactgtttgtcggtacttttatggacccaaccccggcaatccttatttttacaccaatcttccttcctatctgcaccagtttaggaatgagcgcggtacagttcggtattgttctatgctataacctttctgtaggaaccatcactcctcctgtaggaacgatcctgtttactggctgtaaagtaggcggtgtaaccattgaaagtgttatcaagcacctgctgccgtatttcggtatcatcatagtcggtctgcttttagttacctatatccctgtactttctctggggctgccctctttgttgggattgatttaa

SEQ ID NO: 2403 - DNA, 924 bp, Clostridium clostridioforme
atggaatttcgggaatttcaatatgtcatcgcaattgccaaatatcagaatataacaaaagctgccgaatctctgtatatcggacagcctacattaagcaagtttctcaaaaatctggaagacgaacttggcgtcagcctttttcgcaaagccggtcataaatatcacctgacctatgtcggagaacgatatctggaaaaagcagagcagatcctgcagttaaaatccgatctggatgtggaactggctgatatcgttaaaagaaatgtaggcgtattacgtcttggttttcccaccatgcgctgtacctatatgctgccagccattcttcccgcatttcaggagatgtatcccaatgtaaaaatccagattgtggaaggaccttccgctgagcttgacaaaaaactgttaaacatggaagtggatcttgctttttataaccagcgttttggagacaccaatccattaatccagacagaaattctcggagaagaggaacttctgatctgtgtaaaaaaaggccaccctatggaacgttttgcccagccaaatcctgccagcaaatatcccagacttgatgttcgcctgctgcaaaatgaaaccattctgctaatgctgaaaaatcaacggacccgccagattatcgaccagtatcttcaccagcagggcgttgttcttgaaaatatcctgcataccagcaacattcctgcaatcatggagcttatttctgttggatatggtgtcagctttttatttgaacctcatatattacatcataattttaaaaatcccatctcatgcttcagcttcggagaaccgcggactacctccgcattagtcgttgcaacccgcaaaaacagttatctcccatcttttgccaatgattttattgaactggccaaacgcctttatatcaatatatag

SEQ ID NO: 2404 - DNA, 855 bp, Clostridium clostridioforme
atggctgagataaaagtaacaaatctgaaatacaggtatccccacacagaccgccttgccctggacggaatcaattgtgaaatccatgcaggggagttcataggtattataggaaggaatggctcaggtaagagtactttttgccaggccctcacagggctggttcccaacttttataggggtgcatacggagggaaggtctttgtggatgacatcgaggtcaggcatgtggaggtggatgacttatgccggaaggtgggaatcgtgttccagaatccatttaaccaggtgacgggttccaaactgactgtctatgaggagattgcatttggtctggagaatttcggcataccaagggatgagatgatacggcgcattgacagaagccttgaggaactggatattatccggtttaaagacagggcgccctttgacctttcagggggacagatgcagaggatggccattgccagcatcattgccatggagcctgaggttatcatattggatgaaccaacctcgcagttggacccgcagggaagcgaggaggtgttccgagcggttcagagactgagccggcagggaatcactatcattatggtagaacacaagatggagaaaattgcagcctacagcgatcgggtcatgctgctggatgacggaaaactggtggattttgatgcacccggagctatattttccaggaatgatttaaaggaacatggtgtaatcgcgccttcctatacaaggatatgccgggaacttggaataaagacaaaagagacggaccaatatccggttaccctggaagaggcaggcgcgcttcttacatacggacaggaggggatggtatga

SEQ ID NO: 2405 - DNA, 939 bp, Clostridium clostridioforme
atgctgtattccggaaacattgacggagatgctgcttttttggtcattccggaaataaacaaactggaagactggcattacaaagtcataaaagatatctccgcattattccaattaacggcctgcaataaaataaacacccaggactttgcggcatcggtaattatggcacaatccaattcaaccgatacgattctgcgctattgtaagatgtataattttgattatgccaaacaacgtatctgcttagctgttgaattaaataattcgatgtccatctcatcgacccgcagatatataatccgggatatcttcgcttccatcacgtcgtggatcacgaacacctatggatgtaaggttttctttctgaaaacccatacccattatgttctgtatctgctcttttccaatgatgtgtcccaggaaacagcggaatatcaggccgcagagtcggctaaaaaaatccatcaatttttcggccgggacaacatttccacactgatcggcattagcttgtatgcttctgacccacagcagatttcaaaggcattctttcaggcgattgacgcgatcaatctgggacagaagctctatccggcagaatatgtgtttttgtttcgcaccattcaggtctatcaatggctctccacgatgccccaggaaaacctgacggaaatgtacatggaaacagtggagcctttatgcagagccagcaatgccgacgttaactacgtgcaggtattgagggcctacatagaaaatcattataacatcagtaagactgcctctgatttgcatatacaccgcaataccatgatgaattatatggcccggattcaggaattactcccttacaatatcgggcagccggaaaacagactgaagctgcaaataggcatacacgcaatgtatttgttggataaacagaatgaatcatag

SEQ ID NO: 2406 - DNA, 567 bp, Clostridium clostridioforme
ggtgaatttatgctttggagaaaaaaagactttactgttgcagaaatggaagagatggaaaatactctaagaaatagtaagttatatttgttaaaattaagtgctgatgatgacgatttgtccgggaaattagggctaaaagttgaatatgttacaaatatggctgatgataacgaggcagaactcattccaattgatgacagcaattattatggtctaattaggctaagaaaagaactaaaaaaacataaatttgcgtatattcatgagattattcattatatatttgatgttgggtatggcaacaaagtggatgagtgtttttttagaaaaaagaaaggaaaaaccaacagtcacgaagagcagagaactaattatatgacagcagcttatattatgccatttgagcaaattgtgagtgagctttataaatatgatcatagtgttcccaaaatggatgaaatagtatttattcgtacacttcaaagacattatgaacaaagtgaaactgctgttattcgaagaattcgtgaagttcgaaagttaattaagtcaagtggatgttag

SEQ ID NO: 2407 - DNA, 1266 bp, Clostridium clostridioforme
atgaatcttgcaattattagtttgatcgtattggtgatggttgttgctattggatttattaaaaaagttaatctgggttttctttctttaggggtagcatttattttaggtaccataggtgatatgagtgcaaaagaaatctctaatggtttcagcagttctatgtttgtaacacttgttggtgtcacctttttgtttggtatggcgtcgaataatggaacgctggaactgttttcaaagaaaattgtagcacttgtaggaaaaaaaaccgtattgattccaatccttatgtttgtactgtccgcttttatttccgcaatcggaccgggacatattgcagccggaatcctaatgactacatttgcaatgtatcttgcatttgaaatgaaaatcaatccaattgctactgcgttgtatgcaaaactgggtgcgaatgcaggatgtgcatcaccgttgtctttgactggtgttcttgcaaaaagtctttctgatccgttaggatattccggatttggcctgcacctgtttctgagtacactgatttccggttttatctttactttgattttatatgtggcatttaaaggttataaagtaaaagcagacaaccctctgaagctttctgaaattcctaaatttaatcgtgaacagagatataccattatcggcattattgttatggtagtttgctgtatcggatttaaattagatacaggtctttttgcctttgttgtagctgcagtactgattcttctgggatgtgcagatgaaaagaaagccattaagagcattccatggggaacactggtatttatctgtggcgtaggtacactgatcaatgtaatcaacacacttggcggtatcgaactgatttcaaatttcctgacaggaatgatgaatgaaaaaacagcaactccgatcctttctgcaacttccggtattttatcctgggtaagttctacaacaggtgtggttatgccggcattgttcccgatcgcagcagatgtagcagcctcttttgcaggcagtgtaaactatgtggaattgatttccgcaattgtagcgacttcctttgcagcagcaatcagcccattatcaacaggcggtgcgattatcatgtcttcctattctgcagcaaaagaaacaacaaatgacgagctgaacaaaatgtttaaacagctgtttcttctttcagttggaaacgtattgctgaatgttgttttatcagctcttggcctctttaatctgggcggactgttttattaa

SEQ ID NO: 2408 - DNA, 915 bp, Clostridium clostridioforme
gggatcgttacggtcatgcggtcaggaggacagtatcaggtggtgatcggcaatcatgtgccgcaggtatatgaggtggtttgcgaaaaagcacatatatccggcgcgcaatccgaagaagcagaaggcgacaaaaatatggcctggggggcctggatgctggatctgctgtccggaaccttccagccgatcttgggatttttggcagcggccggtattgtaaaaggtcttttggccgtgctggtgttcgttgccggagcatcggtgaaggacagcggattttaccagatgatgtatgccattggagatggattttactacttccttcccatgatcattgcggcatcctgcgcaaagaagtttaaatgtaacccatatctgggcatgagcatcgcggctgcccttttgtatccggccatggttggcctggagaccaccggcaccctgtttgagggcaccctgatggctctggattataagaccacctttctgggaatcccggtggtatatcccaagtcaggatacgcctcatccgtagttccaatcctggtggccaccggagtgggagcgaagcttgaaaaatactttaagaagattgttccggataccttaaaactgttctttgtaccgtttttgacggtgattatcattgttccgctgacttttattgtgattggtccggtggccggcatccttaccaacctgctgaacgcgtttttccaggcgatctttgcgattccggtgctgggcggcgtggtaaccggtatcctgattggcgcgcagtggcagatcttggttatcttcggtctgcactgggcggttatcccgatcggaattgccaatatcagtacatatggaagcgatttattcatgactccttactttgcggcttcgttcgcgcagtctatggtagtt

SEQ ID NO: 2409 - DNA, 348 bp, Clostridium clostridioforme
atgtatctggaggataaagaggaacaggagcagttccttttgtcagagctgattgattatgttgaagcgcagctgaaatcttatgtatccatagattggacttcttttacacagagaaaatccctggttcgtgttctgcaatatatggagaaactacagatgctccgggtatatgagggacgcagcgaggcctttggctcggaggcaggacaggaagttttgtatgaaaataccggatattcaaagtattttgcaaccagctttccaactggtatctctatatttgaatcctgggaggattttgaaaagacagattttgaagaatttcaggaaaacagaggcgcattg

SEQ ID NO: 2410 - DNA, 870 bp, Clostridium clostridioforme
cttggctacgaggtgaccaggggggttctggtggactacgatgccatgtacagaaagacagataccattctggaaaagctgggctgtaaattcagaagcagggatcgtgtgacctctctcagcaccggcgagatgcagatgatactgattgccaaggcattgtttcacaatgcaagaatcatttcctttgacgaacccacatcggccctgacggaccgtgaagcggaccgtttgctaaagatgattatggaacttaaggaccagggaattacgatactgtatataacgcaccgtctggacgaggtgttttccatagcggacagggccagcattctgcgcgacggaaagtatatcgccaccctgaacatgaaggagacttccaaggaggagctgatacgccacatggtaggacgggatgtgtccgcctatgccgttagaaataatccactgtgcgccgccggtgaggtggtgctggaggccagggatctgtgcaagaacggagtatttgagcatataagctttgaactacacaggggcgagattctgtcctttgccggactggtgggatccaagagaacggatgtgatgcgggccatatttggagccgacccctataccagcggagaagtttacataaaagggaaaaaggcggagataaaaagtcctaaggatgccctgcggtacagtctggggctgatacctgagaacagaaagacccaaggctttgtaaagaactttaccaacgccagcaacatggcgctggcctccatgaaccggttctgcagcaagggcttcgtgaatgccaggaagatatatgacaactgtatgtattacacgggggaaatgaatctgcatcctgcggatccggat

SEQ ID NO: 2411 - DNA, 1158 bp, Clostridium clostridioforme
acaggtctggtatactggtccatgtgggagtccacagagcctcagggccaggtaatcaaggaagcagttgacaagttttcggcagacacaggagtggccgtggacgtacagttcaagggacgtaccggaatccgggagggattacagccggccctggatgcgggaaccaacattgacctgtttgacgaggatattgaccgtgtgaatactacatggggcgcctacctgatggatttggaagaactggccaaggcggctgattatgacgcaactgccaatgcaagcctgatggaagcctgccgcgaggtgggaggaggaacccttaagtccattccttatcagcctaatgtatttgcgtttttctacaataaggcaatctttgaggaagcaggcgtcacctctgttcccgccacctgggcagaactggatgcggcatgccggaaaatcaaagacgcgggatatacgcctattacatgtgacgacgcatacatactttgtctcttcggataccatatgtccagactcaacggctatgacaagacatcggatatcgtaaagaacaataagtgggatgatccgtctgtgatggagacagccaaggcttacgcggattttgcccaaaagggatatttctcggagaatatagcatctaatgtattcccggcaggacagaaccaggagctggcaatgggaacagcagccatgtacctcaatggttcctggcttccaaacgaagtaaagaacatggcaggcgacgacttccagtggggatgcttcagctacccggcagtggaaggcggtacagacggtccggaagcggcaaactacggcggccaggtgctggctatcaacaagaattcacagaatgcagaggatgcctttaagctgattacctatattaccaagggcgagtttgacaagaagctttctgaggaatccctgggaatcccgtccgacaccaccaactcagagtggcctgtacagctaacggacgtgaagcctgtaatggaaagcttaaagacacgttatccgtgggctgccggagcagaggacaatgtggatatgacgccaatcatcaaagagaacatgaccaagctttgcagcggggccagtacagcggatgaatttgtatccaatctccaggcggcaggaaagtaa

SEQ ID NO: 2412 - DNA, 300 bp, Clostridium clostridioforme
atggaaattatcaggccggcaatagccggaacattggaatccagtgactgtcaggttactgtagaggctggaaacggcagtatcgagtttgaactggaaagttctgtgctgaaccagtatggaaatcagattaaaaaagttacaatggaaacattaaaaaatcttgatattgacagtgtgaaaatcaaaattgtggacaagggtgcattagactgtaccatcaaagcccgtattgagggtgctgtatatcgttctatgcagcagtttaaggatttgccatggggaggtgcgatcagatga

SEQ ID NO: 2413 - DNA, 660 bp, Clostridium clostridioforme
atgggaatggaaacagcccaggaacctccaaaagaaacctttcgcagactgcgctgggcaggaaaaattgccggttatgatatgaatcaggctacaaatggtgtaaatacacataaaggtgcgttgttttctattggaatactttgtggtgctcttggtcgtcttccccgggaaaaatggaaaaatgtaaaagttgtattgggggaatgtgcagcgatgacaaaaggaattgttgaacatgattttcggggagtgacagaagaaaatgccggaacaacaggagaaaaactgtatgtaaaatatggaatcacaggaatccgcggtcaagcggaaaaagggtttccggcagttatggaggctggattaccggctctggaaagaggactgaaaaaaggtttatctctggaacaggcagggtgcatagctttgttggcattgatggtatctacggtagatacaaatctgattgcacgaagcaatcgggaaactcagcttcaggtgacagaagaaataaaagaaattctggaaagaaatccttatccggaggaagatatgctggagattcttgacagggcatttatcagtaaaaatctttcgcccggaggaagcgcggacctgctggcctttacatactttttgtatttcttaaaggagcaatag

SEQ ID NO: 2414 - DNA, 807 bp, Clostridium clostridioforme
cagacactgactgtatacgggctgaatctggaagagacagataccattcgccaggcagcttccatgttccagctggaacacccggatgtcagggtggaattgattgacggccagacctcggcaggcagcaccacggtatccgacaccataagagccctgaatacagagcttttaggcggaaatggggcggacctgctggttctggacggtctcccggcggagtcctatataaaacaggggagtcttgaggacatgaaggaatacttaagtcccatgatagcttcgggagagctgatggagcaggtgtcaaagccttatacagaggaaagcgggagtatttaccagattcccaccaggatgacgctgctggctgcctatggggacagccaggccgtagccagccttgtgtccatggaagccatgagagcctaccagaaggattcgtccaatcttcccctgcggcccaagacaaattatgagagtctgctgcgtcagattctgatgctgaaatacgatgaaatcgtggatatgcgcacgggaaagccgtatccggataaaattaaggaactgttggagaccgtgaaggtcctgggtgaggcaaacggtgccaagcctgcctttgacgagtctgaggatggtggacggggcaatgtctacaaccttattccgggagcggatggactgatgacaagcgaatacaaccgtgtggaccagggtatgagtgccattgcaatcgacaagattggaggcatgtacgatgtcctgctgcctctggcagtacagagaaagcacggattcactatggaa

SEQ ID NO: 2415 - DNA, 1152 bp, Clostridium clostridioforme
atgtacaatgaagataaaaacagattccttcttccggctatgattattcgcggaggaacaagtaaaggtgtttaccttctggaagaagaccttccggaagataagagccaatgggattccctgcttcttagcatgatgggaagccctgataaaaaacagattgacggacttggcggtgcgcagtccgttaccagcaaagttgcaattgtaaaaaaatcctcaagagaggatgcggatgtggattacacatttgcacaggtttcggtagataaggacctggtaagttataaaggaaactgtggaaatatttcttccggtgtgggaccatttgccattgaaaaaggtcttattcagacaaaagagggaacaactccggtaagaatttttaacacaaataccaataaagtcattattgcagatgttcagacagaaaaaggcagtgtggtgtatgatggtgattttgccattgccggtgttccgggcacagcggctccgatcaaactgaagtttgttgaaccggcaggaactcttggaaacggacttcttcccacaggaaatgtagtggatattctggaggttcccaattttggaaaagtagaggtatcaatcgtagatgcagccaatccgcttgtatttgtaaaagcgaaggatctggggatgacaggtcttgaacttccggaagaagtaaatgcagatgcggataagcttgctttactggaaacagtaagaggacttgcagctgtgatgattggtctgattgaagattacacccgttccgcctgggaaactccagggattccgaaaatgacatttgttgctgaggcagcagattatgtgacagcagagggtgtttctatttccaaagaaaacgttgatctgctttcacgaatgatgtctatgcagaaagcacatccaagctatgccatgacgggggccatgtgtacagcagctgctgcggttgttccgggaagtgttgttaatcaggtgctttctgaaaatgtggatacacagtttatccgtatcggacatcccagcggtgttctggagtgtggcgtagattatgaggaaaacggcgcagagccggttgtagcagatacatttggattccgtacagcaaacctgctgatggacggaaccgcacatattaaatag

SEQ ID NO: 2416 - DNA, 309 bp, Clostridium clostridioforme
atggcggataccatcaaccgtatcgacatcgacatcaacacatgggtgctccaggttgtccggctggctgagaataccagcgagaaccaggctgtgatggaattgctggaaaataaaatgattacaaaacagcagagaaattacatagatgaatggttcgacaattttgcccaggtgtttgtggctgtatccgatattcatatgattgatggggacggacagattcgatacagctatgttccttatgagggatatgtagataaagaaaggctcaaagcctgcacacaggaagcagcggaccggccggac

SEQ ID NO: 2417 - DNA, 504 bp, Clostridium clostridioforme
gacagtgcgtcagaaatctacgaagcttcggtaaaggcaaaagaaatcatacagcagatatcctccctcagcaggaaaaacatggagacagcctataagaacatgggggcggagcggatgatgaagcgcgccctgaaaatggtccggtccgtatgcccgtccaatgtgcacctggaaacagacctggatttcaggggaaagtgcattctcggaaacgaaacccagctgaaccaggtcatcctgaatatatgcgtcaattccattcacgccataggccgtgaggacggccggattcttgtaaggggcaggacagccaaaaaaggggagctggagtgcggatgtcctgtaccggtttcagggacctgggatgagtatgtgagaatcgacattgaagacaatggctgcggcatgagccaggatgtgctgaagcagatatttgacccgttttttaccacaaaaaagggtggaaagggaaccggactggggctggccctggtggaacaa

SEQ ID NO: 2418 - DNA, 2268 bp, Clostridium clostridioforme
atgattaagctttatgatgaaggcgtctatcttttgaacggcaatacattggttccggaatctcaggcagctcctgaattgatgagaaaaaaagaagatgctcataaaggaactatttcttacagtatcttacaggctcataacgtcagtggaaatgaagaacagttaaaaatcaaatttgattctataaccagtcatgacctgacttatgtgggaattatacagacagcgaaagcttccggtcttgaaaaattcccgcttccatatgtactgacctgctgtcataacagtctttgtgcagttggaggaacaattaatgaggatgaccacttattcggtctttctgcatgtaaaaaatatggtggaatttatctgccgccgcatatgggggttattcatcagtacatgcgtgaaagcatggctggatgcggaaaaatgattcttggttcggacagtcacactcgctatggtgcactgggaacgatggcagtcggtgaaggcggcggtgagctggttaagcagctgttggaacagacctgggatgcagaatatccggaagttatcgccgtgtatctggatggaaaaccaaatccgggtatcggaccccaggatattgcaattgccgttgtaagtgccgtatttaaaaacggctatgtaaaaaataaagttatggaatttgtaggacctggagtttcttccatgtcaacagattatcgtaacggtatcgatgttatgacaacggaaacaacctgtttatccagtatctggcgcacggatgaagatacaaaagcgtatctggacaaacatggccgcccggaagattacagacagcttgatccggcacaaactgcccattacgacggatgtatttacatagacctatccactattcacagcatgatcgctcttcccttccatccgtcaaatgggtatgaaatacgtgaattaaatgaaaatatggttgatattcttcatgaagttgaagaaaatgcttctaaactgattaaaaatccgaacctggggctgaatctcagagataaggtgcgaaacggagcgctttatgctgatcagggaactattgcaggatgtgccggaggtacatacagcaacattatggaagcggcacatattctgaaaggcaagagtaccggaacggatgaatatgcacttggaatttatccaagcagtcaggccgttatgctggaattgacacgaaatggagcactggcggatctgattgaagcaggagcaaccattcggacagcattctgtggcccatgctttggagcaggtgatacaccagcacataacggactttctatcagacataccaccagaaatttcccgaacagagaaggttctaaaccaggtaatggacagctggcaagtgttgcattgatggatgcacgttccattgcagtttcttcagcaaatggaggacggattatggcagcggatgaagctggttatgagtttgaatgtccggaatatcgttatgatccaaaagcatatcagcatcgtgtgttccagggtgtgggcaaagggtgttcagaagaaaccgttatctgtggaccgaacattaaagactggccggaacttccggaattaaacgaccatatgcttctgaaagtatgtgcatatattacagatccggttactactacggatgaattgatcccttccggtgaaacaggttctttccgttccaatccgatgggacttgcagaatttacactcagtcgccgtgttccggaatatgtgggaaaagcaaaagcggtaatggaaaatgaaaaggcaagaaaagcaggaaattgtccggcagaagttgcagatattatttccaggattcgaaatatttccggatttgaagaaattcaggaagaaaaaattgatctttccagtacgatttatgctgtaaagcctggcgatggaagtgccagagaacaggctgcttcctgtcagagagttcttcttggcggagcaaatattaccgtggaatatgcaactaaaagatatcgttccaatctgatcaactggggcatgattccgtttatcatgaatggaaatcctgactttgaagacgacgattatatctttgtcccggatattaaaaaagcactggatggtgacatgagtgatattccggcatatgtaatcggaaaagaaataaagaagctttcccttgcaattgcacctttgacagatgaagaaaaagaaatcattcaatgtggttctctgatcaattataacaaagctcataaagcatag

SEQ ID NO: 2419 - DNA, 903 bp, Clostridium clostridioforme
atgactcatctggaaattgaagcattttttgagatactgaaggccggctccatatcctgtgccgcgcagaatttgtatgtgacccagccggcactcagccggagaatcaaagtcttagaagcagaactgggatatccgttatttgaacgaaacaggggaaagcgtaatattgtcctgacaaagcagggagaagcattcattgctgtcgcccacaaatggcttggcgtatggcaggaagcccaggaaatcaaacggcttaacagccccagaatcctaaatctgtcctctgtgggaagcgtgagcagttatattctgccggatgtttttgaacaattctcacagcagtatcctcaagtgagcatctgctttcacaactaccattcctatgaagcctatcagtatatagacagtgggctgattgacatcgcttttatttcggaccatatgtattataagaatgtggagacgattcccgccttttttgagccaatggttttcgtcgcaaacaacagttgcaattatcctgattcggtttctcctgctatgctgaaacccagtcaggaaatcctgcttccgtggaaccctgagtacgatgcatggcatgattactggttccgctccaggccggaattcgaagtatcgctggatcagatggatttgctggaacatgccctgctctggaaagatacctgggctattgtccctgcgtccgtggcggataaaatcgttggcagccatgtctcgattcactacctgtcctcgccgccgccggaccggattatatattatctgaaaaaaacgtgcaagcagacggagaccgtctccctttttttaaagctccttcataaaaagctggagacaataccacaggtgacctcctatctgtcaggagcgcctgattaa

SEQ ID NO: 2420 - DNA, 903 bp, Clostridium clostridioforme
atgaattgtccaaataaaaaacgtctgagaagaaccatgatgttcttaaatgctcagaaaccaggtctgattaaagacccgtatatttataaaccggattccattatgctggatctggaagatgcagtagcagaaaatcagaaagacgcagcaagattttccctgtaccatgcgctgaaaacactggactatcatggatgtgaaagagttgtccgtattaacggtctcgatacagatctctggagagaggatatccgctgtgcagtggcaggtggctgtgattccattcgtattccgaaaactgaatgtccggaagatgtggcagcagtggaaaaggcgattgtagccgctgaaaaggaatttgatcgtccggaaggaagcgttctgatcatggctgctattgaatccgcaaaaggtgttctgaaatcctatgatatctgtactgcttctgaaagattgtttggtattgcgctttccggcggagattatacaaaagatcttcaaaccaacattacaggtaccggaattgagctgatgggagcccgttctcagatggtgatttccgcgagagctgccggcgtacagtgctttgacactgtttacacagatctagataacatggaaggtttccgtaaagatgtagaaggaattcacttaatggggtttgatggaaaatctattattaatccacgtcagatcaatattgtacatgaaatttttacaccatctcagaaagacataacctttgcacagaaggttgttaatgaaattgaaaccaagaaggcacagggcatcggggtatttgccgtagacggcaagatgatcgatattgcattttatgatggtgcaaaacgtacactggagctggctaaggcatccggcgtgtataaggaggtgcagtaa

SEQ ID NO: 2421 - DNA, 891 bp, Clostridium clostridioforme
atgacttttgatgtgcttgattttggcgcaaaggcggaccgcgtcacagatgacgcgcctgctatccaggcagcgattgacgcatgcagtaaggccggaggcggaagggtggttctggagggcggaaagcatttttattccggctccattatcttaaaggaaaacgtggatctgcacctggaacggggggcagtattacaggcccataaggatctggagcgttacttccatcccaacgccggacaaagagacgacggcgtggaacgggtgggaactccggtgaccctgaaaccttcctatgtgtttatttacgcaaaggatgcggacaacatagccatttccggagaaggagccatcgacggaaatgcctatgcttttgtgcggcaggtgagcccatattatgtgacgggcgacttttatccgcgccctactctggtctatgtggagcattgcaatcacatctcatttaaggatgtaattatgagaaatgcccccttctggaccctgcatccggctggctgtgacgatgtgctcatatcgggccttcggattttaaatgatttgaatgtggctaattctgacggcattgacccggatcattctaccaatgtgcgcatcattggctgccacgtcacatgcgcggatgactgtatatgtctgaagagctcttcgggaaatatggaatacgggcctcttaaaaatgtaattatctcaggctgtaccctcacgtccacctccgctgcattgaaaatcggcacagagggaacgggggatttcgagaatgtggttgtggataactgcatcatcagtgacagcaaccgcggtatatccatccagatccgggacgggggaaatgtgaggaatgtttcattttcaaatatcatcatagag

SEQ ID NO: 2422 - DNA, 1272 bp, Clostridium clostridioforme
atgagaagcatgaaaaagaaaccaaatattatttttataattacagatgaccagggggcatgggctgtagaatctgagacaaaccatgatattaagaccccgaatctgaaacgtctggcagaggcgggagtaacctttgatgaattctactgtacttctccggtctgctcaccggcaagagccagtatcgtaactggaaagatcccttcctgccatggcatacaggactggttaaggaagggaaatctggatgcctggaaatatcctcatatggcaatgatggatggatttgatatggaagacaagtccattgattacctgaaaggccataaaacctatatggaatatctggctgaaaatggttaccactgtgctttaagcggaaaatggcatatgggagataatattacaaagaaaaagggatttgagtattattttaccattggaagaggcggctgccattattatgatgcagatatatttgaagacggagagttatccatttcccatgaatatattacagataccatcacaaaccatgctttagagtatctggaccggctttcaggagaaggggctccattttatttaagtgtccattatacagcgcctcatagcccctgggatgcaagtgaacacccgaagaaattcagggatctgtataaggactgcgaatttaaagatacacaggctcttcctattcatccatggcaggcaaataatacctgtccgatcggtgatacacctgagaagagaagggaatatcttacgggatattatgccgctatctctgccatggatgcaggcgtaggaaagatcatggactgggtagatgcccatgggctggaagaggatacagtgatcatctttacttccgataacggtatgaacctggggcagcacggaatctggggaaaaggaaacggtacctatccgccaaatatgtatgattcatccgtaaaagttccatttatcattaaagttcccgaatgcgaagcacctggatccacctgttctgctatggccggacagtatgatattttccctactatcctgtcactggcaggatgcaaatatgagctggagccgctacagccgggaaaaagcctgttggagcagatcaatcatccaacggaaaaatatgaagaccggattgttgtatttgacgaatacagcaagacccgtatgataaaaaagggaagtttaaaatatatccaccgttacggagacagtccctgcgagttttatgacctgtcaaaggacccggatgag

SEQ ID NO: 2423 - DNA, 498 bp, Clostridium clostridioforme
gaccagatatccttttctaatcttaaatattcccaaagcggattccagctggatatgttcattgtatctaacgaaaaaatatggcttatgggaccgaatggacaacgggaaaaattgcgaaaggattttagcgctgtttcattatttcgctttgaactggcacaacgtaaaagcaccaatgctgttacaggctgttttcgattcatatctgcttctgggaaacaggtagcggcagaagctattataagtggtatctatgatatacgcattgaagatgatgtgttaaaattctatgaaaatcaagcattgtatcgcgatcagcccatacaaggtgagagcttcaaacctgtagcatttcaggcagaacatcgtttttatagtaaagatggaaaactacactatgaatatgatggaaaatgttttgacgtggatacaaaaacaatgcagcgcttcaatagtcccgatatctttccgccatttatttcagtagaaaagtaa

SEQ ID NO: 2424 - DNA, 453 bp, Clostridium clostridioforme
gcgcctgttcttgaacagctcaattgtcccattggaatcgtggcagctctttgtgcgcctacatatataaatgtggtgttggaaggacagcaggaacatgcgggctccacgccgatgaatgccaggcatgatgcgatgacggctgcctgtgagattgtgctgaaaatagaaagcctggctcaaagctatggaaacaattatacggtagctacagttgggaggatgcttccgtttcctaattcgtccaatgtcattgcggggagagttgaattttcaatcgacataagagatatcagtgaagatagaaaaacagacatgactcaaaaaatctgctcatacattgatacgattgcaatgctccgcggtttgcgggcctcacattgtgtgacagctgatgatttacctcattcttctgacaaaaagatagtggcggggaattatgaaaaaaggtaa

SEQ ID NO: 2425 - DNA, 594 bp, Clostridium clostridioforme
atgggaggtggtactttgaacattaaaatcatcagccagataagtggtgacaaaggtgttaatgttgccggagacacggaaggagtgacaaggatggcagagttgccgggaaatcggaacaatggtaattttcgttcaaaaccgacacagacgcaggaatatgaacgtgatgcaaacatatttattgtccatggacatgatacgttggctcgtatagagcttaaagattatctgcagaatacattgggctttccagccccggtcattctggctgaactcccggattgcggcaggacgattattgaaaagtttgaagaacaggcagaccaggctgatattgtattcgtattgttgacgccggatgattttaacgatgagaatcaggctcgggccagacagaatgtaatttttgagctgggatattttataggtaaaatgggcaggaaaagcggccgggtcatattgctgagtaaggggaatctggatataccttcagatttaagcggcattctcagaattgatattggacaaggaatacgtacggcaggagaggatatacgaaaggcagtcaagatagccctggaagcaatttaa

SEQ ID NO: 2426 - DNA, 1698 bp, Clostridium clostridioforme
atgggaaaacgtgtgctggttgtagggggagttgctggcggcgcctctgtagcagccagagttaggcgtctggatgcagatgcgtgcattaccatatttgagaaaggagagcatgtatccttctccaactgtgcccttccctactatttgagtagaactgtggaggataaagataatctcacactgatgacaccggaagactttaagacttcttacaatatcgatgtgcgaatcaacaatgaggtgtgcggtatagaccgtgtccgcagaaagattcaggtgaacaatcgaatcacgggtcagaaatatgaagaggcttatgatgaattggttctgtcacctggttccgcccctatttgccctaagctgattaaaggagtatctcttccacacgtattcactgtacgtaatgtaagcgatattgttaaactagatcgatatttaaaccgggagaacatctgcgatgtggttgtagttggcggaggctttattggtcttgaagtggcagagaaccttaaaaaggctggaaaaaatgtttctgtagtagaagcagccggtcaggttatgaatccttttgattatgatatgagccaaatcctgcataaggaactctgtgataatgacgtgaaattaattttaagagatggtataaaggctatcacagaagacaaggtaatcctaaactctgagagggaactgccggctgatgtagtagtacttgcaattggagtactgcctgagactacgcttgcgaaagaggccggactggaaattggtgaaacgggcgcaatcaaggttacaccagatttccgtaccagcgatccacatatttatgcagtgggagatgccattgaggtgtaccagggcctaacacacaagccagtcaggcttcctctggcaggaccagctttgcgccaggcgagggctgctgctgatgccatgtatggtatgcatgggtttaataaaggtgtgattggttcctgtgcagtcagaatttttgaacttaatgcagcagccacggggctaaatgaaaaaaatgcaaaggcgaataatataccttgcgattctgtttataccattgcaatggataaagtaggactaatgccaaatagttctcctatccattttaagctcgtatttgaagtgcctactggaagaatcctgggcgctcaggccattggaaaaggtaatgtggacaaacggattgatgtcatcgccactttgattactatgaacggtacactggaggatttaaaagaattggagctttgctattcccctttgtttggcacggcaagagatgtagtaaatctggctgcactggtaggtcttaacattctgcatggtgttttcaaacagatacatgtaagtgaggtcagaaacctagtagagagtggtgcctgtatcattgatgtaagaacccatgaggaatttgaagcaggccatcttattggtgcagtcaacatcccattgggagagataaggcagaggacttctgaaatcccacacaatcgtcccgtatatttacattgcaggaccagccagagaagctataatgctattatggcgttaaagggctgtggttttatcaacattttcaatatttccggatcgtttttgggaataagctattatgaatactttacagatataacgactggacggaaaaaaatacttacagaatataactttatgtaa

SEQ ID NO: 2427 - DNA, 1209 bp, Clostridium clostridioforme
atgtgtcagaaaggtggtatctggatggattttgaaaagttctgtagagaaaattgtgttgagcgaaggggcaccggcactttaaagtgggactcactgcaggaaatcttcggagatgctgatttgcttccgttatgggtcgctgatatggagattcaatcgccggcagcagtccgtgaagcactgacaaagcgtgtggaacacggtgtgtttggctatggtaaagtagaagattcctattatgatgcattttttgcatggcaaaagaaacatcatggtatagatttggtcaaagaaaatgtacggtttgccacaggcgtggtaggctcactgtatactgcaataagagcatatactaaggaaaatgcatccataataatctgccctcctgtatattatccattctatgatgcaatacttaacaccggaagaaagctggtaacatgtgacctggataataacaagggccattacagcctcaatcttgacaagttcgaaaaagaaatatcagataacaatgtagagatgttcatactgtgttcaccgcataaccctgtgtgccgcgtatggtcagaagaagaactgaatgctatgttagatatctgccacagacatggagtgctggtagtatcagatgagattcaccaggattttacatatggagaaattcctttcatatcttcagctattgttaagggcggaaaatatagggatatgctgattatcctaaattccggatctaaaactttcaacttagccggtttaattcactctcatgtgattatttacgacaggaagctgatggaaacctatgatgcctatataaagagtataggctctccggaagttaacttgttgggagttacaggtatggaagccgcatttcgtaatggcgaagagtggtttgaaaacgtaaaatcactgatttgtcataattataactatatgaagctggaatttgccaaggagcttcctgatgttgtggtgacacctcttgagggaacttacctttcatggcttgatttacgcagctatgtgcctgaaaaagaaacagcaagctttatccagaataaatgccgtctggcttgtgatgtgggggaatggttcagctttacaggacatggttttatacgtattaaccttgcaacagatacaaaaaatatcaggactgctgtggagagtatcgttacaaacatcaaagcactatga

SEQ ID NO: 2428 - DNA, 462 bp, Clostridium clostridioforme
atgaaaggcttatggaaaaaatttgaacgcctgacatcgaagtgttatacttatctggcgggagatgtaacaaatgaggatgcctgggacaaggcatatgaagtattggttgagattgtccgtgaaggcagaagccaaaacagcaattacgcgaaggaattgtacctgctggatgacgggacggattatgagtacgatgtatgcggctggctgcaggactatctggattatctggatacgggaaaacagtacgagaagattcgcagaatctgcggggagcttataagcatgttttcgtgggaagaggaaaagccgtctgattttcgcttttatatagcatcatcttttggggcggaaggaaaaaagaaagaggccctggagttttgtgaggattggtataaaaaggagagcggcaatattatgggggctacggcgctgatttatgccaggaccggcgtgggc

SEQ ID NO: 2429 - DNA, 699 bp, Clostridium clostridioforme
atgaaaaagaagggtgtactgagcattatgatggcagtggcaatggctgcaaacttagctggatgcggaagttccggcacagatgtgggaagcggtgaaccaacaaagactgtggaagtgtcttctgaaaaagaggaaacgtcatcaggagccgagaaggctgtatcaacggaagcaaagtcggataaagttgtatcagatataacgattgcgtatgtcccaacaacgatgaataatccattttggacagctatgatggggggtatcaaggatgccatgactgataagggaatggatccgggcagacagttggttacagtagatgctgaaagcgatcaggcaaccatgaataattacatttatgacttgattaaccaggaagtggatgcaatcattatggcgcctatggattgtactgcatgtacagaagcgcttcaggcgtgtgcagatgctaacattccggttgttaatgtggataccgctgcagatcgcacagatttagtggtatcggtgattgcttctgataactatgcggcgggtgttgaatgtgcaaaaaatatgatggaaaagctggaagagggatctaaaatttatattatgaatcagccttcgggaactgcgtgtgtacagcgcgagcagggatttagggataccattggcgattattttaatattatagggacttctgatacttcagga

SEQ ID NO: 2430 - DNA, 714 bp, Clostridium clostridioforme
atggtacagcttaaaaaacagtatgtgagatatatcattgcagccgtaatcctggcggctgcggtgctctgggtaatccgtctgaacagtatcaccaggacacagcttattaaccgcaccggccagagttctgagaccggtgtggttgtccgcatattacaggacaatatacaggaggacggaatgcgcattggccagcagacgggtgtggggcgcatgacgagcggtgagaaaaagggagaggagctgaccactaccagcagtgcgggttatctgtttggagccgcgtgtactgtgggtatgagggtagtggtgatgcagagcatagccggcgattctgtgattaccagtgtctattccatggaccgcaaggaagtgataataggatttgccgtgctgtatctggggactctctgtgtcataggaggaaaaaaaggaattaggggcgccctggggctggtgtttacatttgtggcgattatctatttgtacctgcctctcgtatatcagggacactcgccttttatgtcggcagtctttatatgtgcggtaacagcggcggtcactctgtacctgataggaggggctgggaaaaagacggtgtgcgccacggccgggactctggacggcgttgtgatagcaggggtggctgccgccatattttccagactttccggcattacgggatggaatgtgtcggatattgagagcctg

SEQ ID NO: 2431 - DNA, 849 bp, Clostridium clostridioforme
atgaaccagattgacataaaggggctgcatttttcatatacggaaaaggaagaaatcttaaaaggaatcaatcttgttattgacgagcgctctactgccatcatcgggcagaatggggcaggaaagactacctttgttaaactgttaaagggacttttgcggcctacacaggggaacattctgtttaatggccaggacctgtcggattttacggcagctcagttggcaaaggacattggactggtgtttcagaatcccaatgaccagatatttaagaatacggtaatagatgaggtgatgttcgggcccctgcagattggcatggacagtcaggtcgcagaagtatcagcccaaaaggcgttagccatggtgggactggagggaaccgaaaaggtaaatccctatgacctgggactttccgacagaaaaatggtatccattgcagcaattatagccatggacacggatgtagtcatatttgatgaaccgactattgcccaggattatatgggcaaggagaggattaaggccattatgaaggcgcttaacagggaacacaaaattgttatttccattctccatgatatggattttgtggcggaaacgtttgagcgggctattgtatttgcaaaggggaatgtacttctggacggggataccagggctgtatttggacagaaggatatgctggagcaggcatatctggagcagcccggagccaccagattgtgccatgaactgggatacagcgaggtttttttgtcccctgaggaatttataaatttcaagataaagcaaccgttatcaggaggcagacgggcggatcggccgccgtaccaacggttataa

SEQ ID NO: 2432 - DNA, 1356 bp, Clostridium clostridioforme
atgaaaacaggaagaacagttgcgttggggttatctgttattatggcagcttctgtaatggcaggatgcggcggttcaggttccacaaccgatcaaaaaggggaggcaaaggcagaagcatccgcagaaccggtggtgctccactggtggggatcctttgcggagaatatggggccggaacaggtatgtgaagcttttaataagatagatcccaatcttcaggtggagtatacaagatatgtcaatgatgatgcgggaaataccaagctggatatgacgttgatgtcagatacttctattgacgttttcttcagtatgaatgatattcttttaaagaagagaattgacagcggttatacttatccgctggatgaattatttgacagcgcaggctttaagctggatgaagactatgaggatactatttcccagaaagaaataaacggacattattacagtcttccggcaaagagaattacagagacgatcctttataatcagcagatgtttgatgaagcaggtgtaccgtatccaagcaaagactggacctatgatgaattcctggatacagccagaaaactcaccaaaggagaaggtaatgacaaggtttatggctggttcttccctggatatgatgcgggacagccggcactacgtatgttaaacagtaagctgggagtggactggatgtatgccccggacggaaaatcagcgtttattgatacagaagatgtaaaagatataacagagaaatatttacagcgcgtcagcgaaggaattgagccaagttatgtagatgtgaccacacagaaaatggcgcctgcaagcatgctgcttacaggaaaagcagctatgatattcggtgactgggtagtaagagatgtaaaggatacagctaactatcctcatgatttcaaggtaggcttcgctccaatgccaagattgtccgcagatcaggaacacaattatactacatcttatacggatgacttaagtgttaattccaagtcagagcatccgcaggaagccatgaagttcatcaagtggtatatcgaggaaggcatggattatgtggcaccttatgcaagaattccggcatgtaagaagtatgatgcagataaggtggcttccctgatctttggtgatcagcaggagctgtttgatatggagagtgcaaaagatgtatatctggcaggaagtgatgtctccatccgtaagaatatgacagccgctacagaggtcaataccattttaacagaggaatttgataaggtatttgccggagcccagtctgtggaggatactctgaaaattgcccagaagagagcggatgagaagatcgcccaggaacagtag

SEQ ID NO: 2433 - DNA, 927 bp, Clostridium clostridioforme
aatgggaaggtttatttaaaactaatttaccggttgaagaaagcggctgctcttttggagaaaaatcatgtgctgggctttgatgagatacagctttctggcagccacttaaaaacccgtcaggcagaacagtggttaaacagaattgcagagggtacagaaatccgggtaaaggaaaaagacactcaaatcgaaataaaggcagccgactttgtttacatcatagataaacgaacagccctttttgagcaaattcagtttgccggaagaaattatctgaagcgtcctatggaactgaatatttggagagcaccaacggataacgatatgtatatgaaagaagtctggaaaaaggcccattaccatgaagcatatacgagagcttatgatattgaggtttgtcagaacggaaatggtgtggaaattttggcttatacagcggtagtcgctgcaacagtgcaaaaaatcatggacgtaaaaataaagtggatagtagacgccagcggaaaagtatcttctgaatttacagtgttgaaagatggggaatttccagaacttccgagatttggtttgaggcttttccttgataagagcatggagaatgcctgttattatggaatgggtcctcaggaaagctacagagataaacatagagcagcgagtcatgggctttatcggtcgaaggtatgtgacttacatgaggattacattcgaccgcaggaaaatggaagtcactatgactgtgattatctggtgctttccggttcacagtatggaattgcggctgttgcaaagaagtccttttcattcaatgcttcgcattacacgcaggaagaattggaaagagctgcgcataactatgaattatgcgcagctgacagtacaatactttgtttggattatgcattaaatggaataggatcgaat

SEQ ID NO: 2434 - DNA, 1104 bp, Clostridium clostridioforme
atggcttccgtgaccggctgttcttcacagacaggaggaaaccaggtccagtcagagacagaaggacagaaggccgaatcacaggaagctgtgccggatacccaatcccagacagaagcagcggaggaagaagcggttaaagaggagccctctccggctgcggatgccggaacatcaggggcaataaaaatcacggatgcggttggaagggaagttgtattagataagccggcggacaaaatcgtaagcgggtattatatcaccacctccatgatgattgcattggggattgaggataaactggttggtatcgaggcaaaggcagcatccaggcccatttatggattggcggcgcctgaacttttgaatctgccggatgtggggactgcgagggaatttaatttagagggatgcatatcccttgagccggaccttgtagtacttccaaagcgtttgtctgaacaggccgagactttatccggcatgggtattgcagcattagtggtcaatccggaggatacggatttgcttttgcagaccatttccatgattggacaggcagcaggggcagaagaacaggcagagaaactgatttcatattatgatacaaagcttgaggaattagataaaatttcaggggaaaagacggaaaagccatcggtctacattgcaggaaccagcagcgtactgacagcggctactccggccatgtaccagaacagtgtgattgaaacagcaggaggtgtaaatgctgccagtgatttgaccgataaaggctgggccaatatatcgtatgaacagttgattgcgtacaatcctgacattcttgtaatcatcccggaagcggattttacaaaagaagatgtgatgaaggatgggcagctggctgaaatcaatgcagtcaagaacgcgcaggtgtatgaaatgccggaagacttcgaggcatgggattcaccggttccttccggcatcctgggatgcatgtggctttccagtattatcaatgaggataagtatccctttgatacatttgcaggcgaagcagctgatttttataaagaattttatcatacagacattgatacggcattgattacaaagtaa

SEQ ID NO: 2435 - DNA, 543 bp, Clostridium clostridioforme
atggcagaaggaaagcaagctgggaaatatatttatattgacagacggaacaggagagtgatggatatgaagcaggtattaaaaggcggaattgttgttggcggaagcggcagtttcaaggcagatgtgctcattgacggggaaaaggtggcggcagtgggaaccggggaggaaatcgggcatctggcagacaaggatacccgggttgtggatggggaaggctgccttctctttccgggatttattgatgcgcacacccattttgacctccatgtggcgggaactgtcacggcagatgattttgccacgggaaccaaggcggctgtcaggggcggcaccaccaccatcgtggacttcggaacacagtacacaggggagagcctggctgacggcctcaggaactggcatgaaaaagcggacggcaggtgctcctgcgattacggattccacatgtccatatcggactggaacccatcggtcagcagggaactggacgacatgatggaagagggaatcacctcatttaagctgtacatgacatac

SEQ ID NO: 2436 - DNA, 822 bp, Clostridium clostridioforme
cgtgtctccatgatggaccgaagcggtgacagcagttatgaatatgacgggcttggacggattaccaaggtgaccaccggctccggtgaggtcaccacctatgcctatgacggatgtgaccagctggagagcatcacctatccggatgggaagagtgtccgttatgaatacgataagaatgacaacctgacaaaggtgacagaccgaaccggcgccgtcaccacctatgtatatgatgccatcaaccgtgtgacggaaatccaccgcccgaatggggtgaatacctacaacacctacaatgccagggaccagattgtatccatggtcaaccggtgcgatgaatgcggatggattgtcagccggtatgattacacctatgatgaccgcgggttcatcgtggcggaggacgcggttgaaagcctgtatgcgtatgcctgggatgacaagcatgacgggaagcatgagagctggcacgatgacctgttcccgcacggcaacaagcatatcaacaaacatgacaaggacggtatctacaacttccagatcatagagacgaaacgtgccttcacatacgatgatgacggcaggctcctgaccgcagccgagaatgaggaacgccagggccggtatgactatgtgttcaaatatgacgacatgggaaaccgtatcttctacagcaaggcgcggaacggaagcgtgcaggaaagcgcggagtacacctacaatgcatcgaaccagatggtgaaggtccgggaatacgacgggaagcattacaggaacgtggaatacacctatgataccgatggaaaccggatcctggaa

SEQ ID NO: 2437 - DNA, 525 bp, Clostridium clostridioforme
agcagaagggtcctcaatcaggtaattgaagatatggaactaaatcttacatacaaagagttagtggaaaaggttaccattgataatccccaggatacgcgaatcctctccatctctgtggaggatccggatcccaacatggcaaaattgattgcagacaagattgcagtcacatcttcagactatattggtgacatcatggaaatggtaccgcccaaattaattgaggagggtgaggttccaaaccttaaatctagtccgagcaatacaaagaatgcattaataggtggttttctgggggccgtgctggtatgcggctttattacagtgcatgtaatcctgaacgatacaatacgtaccgaggaagatgttacaaagtatcttggattatccgtacttgcatccgtgccggaacgtgagggagagaagccggaagataaagaggccatgatttcctctaaatcagggaataagccagtggtaggaaaatccagaaagaagaaaaggggaggccgtgcatcatga

SEQ ID NO: 2438 - DNA, 555 bp, Clostridium clostridioforme
tatgccattcccctgctggccggtctggcagtaggccatgcatttatcccgcccacaccggggccggtgctggtggctaccatgctgggcgtggacctgggctgggtcatcatggtaggtattgtgtgcggtatcttcgccatgatagtggccgggcccatatggggtgctatctgtggaaataagtatgacatcccggttccggaacacattgcaaaccaggaggattttgacgaatccaagcttccaaagtttgggacaatcgtgggaattattttgattcctctggttctcattatcctgaattccattgcaaaggtgatgcctgcccttgcctctttacagcccgtgttgggattcctgggcgagccgtttgtggctcttaccatcgcgacggttgtggccatggtccttctgggataccgccacggatacagcaatgaggagctggaaaaggtgctgaccaagtccctggagcctaccggactgattcttctggtgacagcatgcggcggcgtgctccggttcatgcttcagaactccggtctgggtgat

SEQ ID NO: 2439 - DNA, 507 bp, Clostridium clostridioforme
atgatacatccagacaagataggaatggaagccaagaaaagagaagatgagaattacaaattccgtagtttcttgaagggacatgcggatgaagaggaactggataaacaatttctgagattgcataaagaattgtttgctgattatgattgtaataagtgtaggaattgttgtaaaatgtataagggtagtattccggaagaggatgttgaaaaagatgcggaatatttggatattacagttgagcaattcatagatttctttttggaaaaagaagcgtgcggtattggatatcatacaaagcatatgccctgtgattttttacaggaagatggcaactgtaaattaggggattgcaaaccggatagctgcaagaagtatccatatacagaccagccggaacggttatgtagcttgcttggcatgttggacactgtcgccatatgcccggtagcttttgagatatttgaaagactgaaacaggagtacggattcagaaggagatag

SEQ ID NO: 2440 - DNA, 678 bp, Clostridium clostridioforme
atgtccaatgatggagaggcatatatttctcctgaccagagcgaggtcatggcggctttaaaaagaggctttaatattgatgatatggcatttacaaaacaggtacagaaaagagccatggaccttggcataacagggacagagtttgtcactgccgctaagatgtacctcagcgcagaggggaaaaggcaggacagagagagtattcttggcttgttggaggagattgaccagggaacactgaccggaaggattgtggcatccagaacagaaggcatcttaagattgtacccggacagagaggacctggttcccctgttggaccggaaggcaattgatgatgaaatgcggtttgacgtccgcctggaaaagatagatgaacgctaccagtcggtaccggatatagagtacctgtacgaccagatatttgttctggaaaatctgggattctgtatttttacttcgtttgcattgttaaacaacagggaggcaatggagttgatggcggaattattcacatacaggacaggcgttaaagcggactttattcagcttatggagtatgccaaaagctgccgggaaaaagaaataaaatttgaggaggataactctatccgaaatatgagtgcaaatatacctccctttacaaaagtactctatcgctactttgaaaaatag

SEQ ID NO: 2441 - DNA, 834 bp, Clostridium clostridioforme
ctgctggctgaatgtaaaagggaaatacatgagtatgaggagcgatccagacagtatgatgaacttgcggcgcagctggagaaacttcatactgaaaaagcagaggctcagcagaactttaaggctgcacaggaagatgttgtccgctgtgtggatcagtggatcacagatatctatgcagcagagaaaaaatcctctcagtggagtcctgacagcgggattcttccaatactggtggagaaaattcgggagtatcagtcggcagcagatgcagaaacagtacaggcgcttttgcgcaccgattatgagcgccagcgccagggactcatggatctaaaaagcagtctggaatatcagaagaaaatccaggaggaagaactggatcaggaaaaagaaaagcttacatgcctgcggaattcaggggaattggagccggagagggacgagagtatagagcgttcaagaaaggcgcttaagagggctggtatcaaagcagtacctttttataaaactgtggaattttctaagaatctggatgagacgtactgtgcaaggctggaggctcagctccagaaaatgggaattttagatgcacttgtagtatctgaggatgattttgagaatatcagaaagcggtgtcccggttttttggatacggttttgtatgtgaaagggaatggaggttccggcttttccggtctgactgtcagcgaagagctggaacctgctctgaaagagaccgttcagaggattctcagcaatatttatgaagataaagaggatggacaaggaatttaccttgggaaagacgggactttcaaacaggggattctg

SEQ ID NO: 2442 - DNA, 537 bp, Clostridium clostridioforme
gaaagggatgcccttaagtcccttgcccaggaatattacagaaatttatcggagcaggatcgcaggtttatggatgtatcccaggacgaggtgtatgacctgtactgcgaatactaccgcgcggataagctggtggcggagctgacaaaaaacgagaacctggaggtcagtgacgcggaggcaaaggtaataggcatccagcagattgaactggattccagggaggaagcagagaacgtgctggcccttacccaggcagaaaaagcggattttggagccattgccgcaaaatattcaaagaacagccggacagacaggacactggaatggcagaaggacatggatggccttgacagtgctgcatttgagctggagcaggaccaggtcagcgggatactggagcagggcggaagatattatatccagaagtgtgtcaatgcctatgaccaggaggccacggctgccagaaagagcaggctggcccaggagaagaagacaaaggcgttcctgggaatctatgagccgtatgtgaaggag

SEQ ID NO: 2443 - DNA, 729 bp, Clostridium clostridioforme
tcgattatattttcaaataataattgtactgagctgcggcagcaagtgaatatattgaacgaggcagtttatctggataatccctttgtactggattctttgaatactattctgattagaacggatgaaacggagaggaatacaatcaaaaagctgcaaagaaagtctgatgtggttgaggatattgtacagctggagctgattgaagataaggtacaggaggtactgcagaaaatcaaccagatatcatcgggaacccttttaatggatgagagccattcctattattataaggagcgtgaaattggtgagaggttgaatataaataacctgtccacagggttgaaatcgtttgtaataataaaaaccttattggaaaatggaagcctgaagcagaaggatgtacttattttagatgagccggaaattcatttacatccggattggcagcttcgttatgcggagattatcgtacttttgcagaaagtatttgagcttaccataatacttacaacccacagtccgcattttgtggaggcattgcagtattatgctgagaagtatgaaagggacgataagtgtacctactatttgtctgaaatatctgaatcggggtgtagatttaagaatgtgacagaggacccaaccgagatgctttctcaactagtagacgccagtattgcacttgataaattgaaatttcagatggaagatacaaaggatgagtaa

SEQ ID NO: 2444 - DNA, 1047 bp, Clostridium clostridioforme
atgtttgattttgaagcgcggcatgtaatagaggctctgcgttcaggaattccatcccgggcggtggggcagtatttctcagaagcacggcctggaattatgaaagagatatccggccatttagatgagacctgtgagacgggaaaatccaagggaatgataatagcgggtaaatatggggagggaaagacccatcttttaaacactgttttcagcatggcccattccaacaatatggtggtatcgtacctctctctgagcaaggaaacgccctttgacaaattatacctggtctatcagaagctggtaaacaatacctttcttccaaagcgtgtgcagcccggttttacacagattttagagaagatgactccgggaagtccggctgctaacgagcttttgctctatgcggccaaacatttggagacagacaaactttattatctgctgcgggcctatttaaacacagaagatctggatgagaagttcatgcttcaggcggacctggaaggtgattttatagcaaacgtgctgctcaagcagatatacaggcgtatttataatgagcgtgtgaaatataatattaatttcagcaaaacaaagcactgtagagactatttttcctttttaagccgtcttttccgtctgatgggatataacggctgggtcattctgattgatgagacggagctgatcggccgcttaagcaagaaagcccggctgaacgcgtatcggaatatggcccagttcctgctccctgatgagcggctggaaggaatctataccctgttcgcacttggcgcttcctatacggaggacgtcatagagacgaagcatgattatgagaacctggaagaaatttatcctgagcagcaggaaccggttcggactgtcttaaatctgattaccagggcccagcagctggccccactgacagacagtgagattcgggaggtcttaaaaaagattcaggtgttccacggccgggcttatgactggaatccaaatatctccatgggtaccattctggcggccactcagtcaggc

SEQ ID NO: 2445 - DNA, 522 bp, Clostridium clostridioforme
gacaatacccggagcaaatggggcaaagtccgcccctggatcatgatcggcactgtacttaacgccattgtcctggccctgatgttctgggacgtagactttgagggcaacaccttcctggccttctgcgctgtactgtacattctgtggggcatgacctataccattgatgatatcccctactggtccatggttcccgccctgacggacgatgaaaatgagcgcagtcaggtgtccgcgatcccccgtctgttcgcctcttttgcctggctgatcgtaggttccttcggcttaaaaattatcgacacggctggcggcggcgaccgtaaaattggttttgcctatttcgccatgatggtcagtgtgatttttgttgtatgttccgccatcactgtgataaactgcaaagagaaagttgtcacgaagagcgcggagaaaaccactgccaagggcatgctgcatgtcctcatcgccaacgaccaggtgaaggtcattctgggcattgcgctgttcttcaatttt

SEQ ID NO: 2446 - DNA, 1206 bp, Clostridium clostridioforme
gatgggaaccgcaaggtggagaagagctatgagtacagcgtggagaaccgtcttaaggcagtgcgcgatgcccacgacctgctggtggctatggcctatgacggcgacgggaaccgcatattccagctgaactacaacctgcataccgatgatgactggaaggggaattccggaaatgggaacggaaacaataaggacaacaccggaagcggcaacaacggcaatggaaacggcaataagaagagcgccgcggcagccatcgcagaattctttaccggtgaagagccggaagcggggaaactcggtgccggcgtaagccaggcattggttgagcatctcttcagtgaagaaatccttggaggcctggcggaaggtttaggaatcccggaggagactgtaacagcccaggaggagacaggaacagacagcagtgatacggccaacgctgactatgggcaaaccatgactgcgacaccaggcaatgcagccccgggtgccgtaagcccaggcaatgcggcagccagctatgccggaacgaatgataacggcaataacgggaacggcggcaacgtgaaccattgtggctggggggacggaaacaatggaaacggaaacggcaacaacggaaatggcaacggcaacagcagcaccggaggaaccaatgacaataacggaaatgccagcggaaacaccaataatacaggcgggagccagaatcagagcggcatcctgttcccggtggcgggcgaggtatccgagctggagcaggaactgattgacatgattaagaccaccgggaaacagaagaattatgagctggtggagcatgtcaatgatgtgaaccgcgaccatgtggaagtgttgatggagctgaatatcaatggtataatggatacagcgtacagctacgggaatgaacgcctgaccaatgagcgtttcactggctggaccggctactatacctatgacccaagaggcagtgtgacaggtgtgacaggaagtgatggatatatctggcagtcgtaccggtacaacgcctttggagatatcacgttcggcaagccgcagtataacaatgtctacagctacaatgcggagagcttcaatcccaatatggatgcccagtatttaagggcgagatattacagcgtgaagacagccgggttcatcagtgaggacagttacctaggagatatcacagaccca

SEQ ID NO: 2447 - DNA, 648 bp, Clostridium clostridioforme
atgaggacagtgattgtgacagccatagggtctttttcggctgatatcgtcattaagaaatgcagggagaatggaatccgggtcataggctgcgatgtgtatcccagggaatggattgcggacgcggggaacgtggaggtgttttatcaggttccctatgcaacggacacagaccattatatagggaccatgatgtccgtttgccggaaggaaggggcggaggccgtcattcccctgacagacgcggagattgatgtgttcaatcttcaacgggacgaattcagtgaaataaatgtaaccttatgcatgtcggacaaggcctgcatcggcctgtgccgtgacaagatggagctgtaccgctatctggagaagcatatggagggaaccgttattcccacgctgcgcctgggggacgcggacccggatgaaatcaggtatccggctgtgtgtaagccctacaatggaagaagcagccagggccttaaaattgtgggatcccgccgcgagatggaggggttcctgggggaaacagatccggcagattatatcgtccagcccatgataaagggaaacgtggtcacggtggacgtggtacgaagccctgagcagggcacatgcgcagctatctgccgcagggagcttttgcgg

SEQ ID NO: 2448 - DNA, 864 bp, Clostridium clostridioforme
atccatgaattccagaagtcgggcatccgggaggacgagattgcttccatcgtgggggacgacatcctgagcatgacaagggatatctgtgatctggccaggaaacggcttccggggctggaggaacaggtggtgtttcctctggctattcatctgaacatggccatggagaggatgcgcagtcatgggcgtatggtttaccccggcatggaaaatattcgtcagcagtcctacgaagattatgaggccgcctgctatgccgtggatgaaatacaaaaaaagtattatctcactctgccggaggaggaaaaggcattcctggccatgtactttaggaaattcagaaaaaaggacatggcccaggaggggaggattgcggtgctggtggtatcccacggtccggtggccagcgcaatggcccaggttgccaatgccatcatgggaacggaacacgccgttggtgtggatatgaacctgtgggatacgccggcccagatggcggaaaagacagtggatatggccaggcgcgtaaaccagggaaaaggctgcatcgtgctggcggacatggggtctctcctgaatgtgggccagaagattcgggaggagacaggtatgcgggtccgcgtgctgtcacgcacagacaccatgatggtggtggaagcagtgcgaaagaccatgtggacggatgaatccctgaacgagattgcggatgaactggacaagattaaacttaccggaaccagggaacagagcgagtccagaaaaaaagcgattttgtgcctgtgcatcacaggacagggagctgccgtaaaattaaaagaacatttgacggaacgcctgaagagcaacctggccgggaccgtt

SEQ ID NO: 2449 - DNA, 783 bp, Clostridium clostridioforme
atggaaacggttctgttagagattaaggatatgtcggtttcctatggaaaaagggaagtaatcaagcattgtgacataagcttgagagaaggaaaactgactgcgcttttagggctgaacgggtccggtaagacaaccatgctaaaggcatcctgcggactccttaggggaaggtctgcggtttggagggtctgcggcgaggatgcttataagatgaatgaaaagcgaaaagctcagttaatcagttatgtccctcagaaaaacacaatcatctacagtatttccacaaccgatgtggttgccatgggtttcaatccatatctgaactttttttccacgccgtccaaagggcaaaaggaagaggcccggggcgtcatccgggaattggggctggaggaaaaggcggatgcggactttatgtcgctgagcgagggacagaaacagctgattatcctggccagggcaatggtacaaaatgccccggtcatgctttttgatgagccggacagcgcattggattttttgaaccaccatctgattctgtcaaaaataagggaacttattcacagggaaggaaaatgcggtttgattacactgcacgaccctaattttgcattggaatattgtgacgagattctgattctgaaaaatgggagagtcagggattcattcatgccgggacttctgagcgccggggaggtgcagaagaagatgtccctattattcgataagatagaaatattagagcataatgagaaattcgttctggtaaagtccatatag

SEQ ID NO: 2450 - DNA, 459 bp, Unknown
  Unknown gut bacteria
atggtgaaggtgtttttaaagcctttaattgtcatatttgtttctgttcccgtggttctggtagtgattggccctattggagccatagtgggaaattatctggcggatggagttaatttcctttataataagattgactggctaatcattgccgtgctttccgcaatcatgccttttattgttatgaccggaatgcactatgctctgatccccatctgtaccatcagtctggccagctttggttacgacgcggtattaattaccaccatgttctgctccaatttagctcagggcggagcctccatggctgtagccgtcaagaccaaagataatattgtaaaatccacagcatcagccgctgggatttctgccattgtggcgggcgtcactgagcctgccatgtatggaattactttaaaatacaaaacacccatgattgcggcagtctgcggcgcagga

SEQ ID NO: 2451 - DNA, 1620 bp, Unknown
  Unknown gut bacteria
atggaatggattcagaataaaacaatttatcatacaatcgaagaggcaattctcggtatgtcgggtcaaagcgcagaagaactgctatcgccgagagaagtgcccgcagagcaagtctgcggtattaagcaggcgggggagaccattgaggaatgtatccgcaagaatatgcccgtcgtgattgtcggcgactatgatgcggacggcatcacctcgaccacgattctgacgcggctcttgtatagcatgggcgtcaaggtgcggcccatcatcccccgcagatttacggacggatacggcgtatccgattcgattttgaagggcgtcgaaaacagccttatcatcacggtagacaacggcatcgcggccggcgacgttctggacaaggccgccacggagcacggcaacacggtcgtagtgctggaccaccatctcgcagatggccgtgaaccgaaacgcgccgctgtaatttgtgacccacacatggacggagactccagcccatacaaggaatattgcggtgcaggtcttgcgttcaagctggcgcagtatatgctccgcgttgcggacatcagtgccatgccggatgatttactggtacttgcgtgtatcggcacgattgcggactccatgccgctgacgggtgataaccgagctattgttatgaatggcttgcgacgagtcaacagcggggaagcgcatctgcctgccggcatcaatcagttgctctggacagcctcctccggcgctccgatgaatgaagagactatcgcatacaccgtcgcgccgcttatcaacgcgcctgggcgtatgtataatgccggaggaacgtccgtgctgaaggccctactgtgtacggataacagcaacgcacaggcctatcttggaaagatggttgccatcaacaacgaccggaaagcgactgttgaggagtggatgggcaaaatccgcgccgcgattgacacgcaggagaagctgtccgcgccactcgttgcattcgcaaagaaaatgccggagggcatcgttggtctggttgctggcaagctggcaaatcagtatcatgttccaaccattgttctggtcgaaacggaagatggcattgcaaaagggtcggggcggtcctatggagattttgacatgaaggctatgctggacaccctttctgacctgcttatcacatacggcggccatgtgggtgctgcgggcttatctttgatgcccgataaggtctccgagttcagaaaacgtgcgagggattactgcaccggtattgaacaggcgggcgagtatatccgctatgacattgtgctccagtccaaggattttggagcggcagttcagacgctcaagaagtaccaaccgttcggacagagtgtcccaaaacccgtgtgtatggtgagaggatttcaggcgctcggtatgctggagatgggcacgaataaaacgcacatcaagttgtccggaaggaatggaaacgtggtggcattcaacatggcggaagcgttccgcagcatggggagtccggaggtcatcgacgctgttggcagtctcggagagaataccttccgtggggaaacaaccgtacagtttctggcagatgatatccgggcgcatatttga

SEQ ID NO: 2452 - DNA, 1212 bp, Unknown
  Unknown gut bacteria
tccgattcccaaaaatttcaggaggctgtcattatgaaaataaccaatccgagaactaaagcagccctgcatattgcaggagctgtcgctgccgttgccgcgctatgcgcacttgttatcctaatcggccgtggctgtcagaaggacaacgacacgccgaacgggccgcagcattctgttgcggattctgtgaacacggacggagaggattctcaggaaccagaccactccggttctcagattcccgataactcagaaacttccaatccgggcaccagcgacaaaccaccactggaggattatgaggatttcggggacaatacggaggacgatgtgccggtcggcacatataagaacgacaaagttctgtcgttcaattatggcagcgggacgctgtatctcggcgtagagacggataccagcgatgccatttatctgaaccccagctcttcggaagctgccgccagtccggataagcagattggcttttacatcatgtccagcagcccggaactgtcgtattccgaatgggaaggcgctgaaccgacagataagctgaacagcaacagagcgaatctcgtattcaaggatgataagtttaatacggcggttcctgcggcgtatcacaacacggtggattatggcgtgaagtggtctcgttccgagctgcaactcaatgacgatgatggcggcaccgtcctttatattcgcatcgtgcaaatcaataccggaaagctgctggcggtctgcaaggcgaccatcacatacgaccccactacgaacagccactccctgacatctctcaccgataacaacatcaacgcaaccggcgaattggacggaacgggggagagtgcggatgacctcgctgcacaagcagtcgaatatctcaagacgaagggcggtattgccgccaccgatgaaaattggaagaaagctgccaagagttgcatcattgaaaaggttccgaccacctatgctttccgcttcattggaacggatgggaatgagacgaatatcggaaactatgagaattgcgatatctacgccgtcaatattcagtttcccggcgacttcaacaccgtttacttcgctcccaaaatgcaaatcatgggcttcgagcgcccgaccgagccgggaaagacggaaattcgtctgcaagtccttggcatggccgcagcaaaccaccgcgactatggggctgtccgataa

SEQ ID NO: 2453 - DNA, 1389 bp, Unknown
  Unknown gut bacteria
atgcgctcagaaggagggattcagatgccaaatgaacctgtgaaaattactgcgcaggagttagaggaaatcaagaaactgccatcctgccagttcatgctcggcggcacgccgcagaccggtttttttgataaagtcaacgagaaaatttactatctcgattcggaaggaaactggatggttaagcgtgcgcgggtcaagaagagagaaccggaaaagcccaaggaagaggaggctccggcagaagagaacggtgaggaagaggaaagtgggaaaaggaggtggctgcgcaggaaggccaaatccgatgttgaggatgaatctgaggacggtaggagcaggttggacgccttgaaggaatctttggagcagccgctatttgagaaaattccgctgaccaggaagaagctgcttgtcatcatcggcgggatgatggtgttgttcatcatcggctccattgcgagcagtgtgcttttcggcggcaatgatacaccgtctaaccctacgccgattgaaaatcaggaacccgtggatgaaccagacccgtccttgaacacgatacaggtcattcaggtcaagcaggacctgattccgggagatgttatcacggaagacgtcattcagagcgccaccatcagcgcagagagctacaatcaaattactctgggcggaacgaatatctaccagtataaccgtgcttccagccttatcggcaagtatgctaccgcatatatcccgaccggtcagtatctcgcatacaacaatgtggcgagtgcatacacgccgccgaagaatccgtgggtgaatgagcaacaggggaaggtctatgtgactgcccctctggacgatgaaaccgcgaccagcgttctcctcaattttggcgcgaaagttgatatgacgattaaaaaggagactgtccggcagacggaagccccggatgattctccggacattcccggaatgacgcatcagacgaccatctatcaaagtgtttccattgacacctacgaaatgcagaatgtcattgtgtgcgatatcctgaacgcggagcaggtcagcatctacgacgaatataccaagctgatggagattcctgcttgtgaacagctcaattacctccgtgcggcgcttttgaaagatgaaacgctggcagataccttgacgcccgcctatattcgtatcaaaatcggcatcgaccaatcggacgcaatcggcgacttgtccgataagtccatttccatcaaatataagctccacgacaattccgacattgacacaacgaccgacgcaaagcgcgaatacgcagcgcaggcaagggcgctggcggagacgattcgggatgccatccacgcaaacgctgagacggctgcggaaggaggcggtgactga

SEQ ID NO: 2454 - DNA, 1437 bp, Unknown
  Unknown gut bacteria
atgacaggaaactgcacccgcagcgtgaaaggaaaaaataagatgccagtatgtgttttaagtgcaaacggtgaacggctgatgccgaccgaaaattacggcaaagtgcgccatctgttgaaggatggccgcgctgtgattgcgaagcggaacccgttcaccatccagctgacctacgataccagtacctatacccagcccatcgaaatgtgcgtcggcaccggatatgagcatatcggcgtcagcattaagacaaaggcaaaagaggtcgtatcgcagcaatatgatatgctcacgaacgagcgctctcgccatgacgactgccgagcgtaccgccggacgcgcagaaaccgcctgcggtatcgggctgcacggttcaataaccgtgtatcaggcaaaaagcccggttggattgctccgtctctggacaacaaggtggagcggcacctggatattatctcccgttatctgtctgtcatgcctgtcacggatgtctttatcaaggccgcgacatacgatacacagctccttgcggcgctggaggcaggggaacctgtcccgcagggcaaggactatcagcatggaccgcagtacggctacgatacgctgcgggaagcggtctttgaacgggaccactatacctgtgtgtattgcaagagaggcctgaaagacggcgctatccttcatgtccatcacgcctactactggaagggtctgcatgggaacagcatgagggagcttgcgacctgctgcgagaagtgcaacacacctgccaatcacaaggagggcgggaagctgtggggcttcgataagcctctgcggaaatataccggcgaagcgtttatgaatagcgtgcgctggattctctatcagcgtgcgatggctcgcttccagggtgttgcggaagtacacatgacctatggcgtcatctccaagcgcgtccgcaccaacctcggcctcccgtattcctgcgctacggatgcctactgcatgggcgagctgcgtccggaagccagatgcgaaacagaggtcttccagaaatacaggcgaaacaacagagtcctatccaaattctatgacgccaaatattacgacacacgggaaaagggagttatccgttctggcaacgagctgtcctccggcaggacgaaccgcaatcataaccttgacggcgaaaatctgcgccggttccgtggctgtaagaagtcaaagggccgaacctcgaccagaaagcagagatatgccatgcagccgggagatatcgtggtctacggcaatcgcaaatacgtttctaagggctgctccagctatggcagggcattaagcctactcacggatggaaagccgcttatggtcagcatgaagaaaatccagcttgttcgtcataagggcggctgggtgcggcttccccatgcagcagccgaggcaaaaaaataa

SEQ ID NO: 2455 - DNA, 2544 bp, Unknown
  Unknown gut bacteria
ttgaaattgattatcgctgaaaagcctgctctggtatcggcaatcgcggacgctcttgacgggccgcgtaagtcgctacagggcagtacctatatgaccgtcggggactacacgctgatatccgtatttggacacttattggagctgaaggagccggaggattacgacgagtgctataaggaccgcaagaacatcagtcttctccccatttatttcgatgactggggcctcaaggttaaggaaccggatgcaaagcacaaggattcccctccagaagaacgcctcaatgaaatcggacgtctgctcaagcagtgcgaatatgtcattcatgccggagacccggatgaagaggggcagctgctcattgacgaggttttgcgttggtttcactacaagggtaaagcatatcggcttgacacacttgacctaacggaagcggggatgcgcagggcgctcaagagcctgacagacaaccgcctgcacgaaaattccggctggtccgcttatgccagaagtgtcgcggacgccattgtggggtttaatctcagccgctatttctccgcgctcaacggggtcaatcttcccgttggccgtgtgcagaccgctacgcttgggcttgtatgtgcgagagacgagcagatagaaagccacaaaaagacgctgtactacgacgtgacggcggtactggacgtcaacggtgtgcgaatcgacacgcagtatgcgccggcgaaagatgacgcaaatttgactgatgggcggatgctcagcaggacttacgcccagtccagggcggatatgctcaaggacgaaacgctcaatggcgtcacagtaacgcggaagacggtgagcgaggatgccccgcttccgttcaatctcggtaagctgacatccttttgcggttcaaagtttggctacaaaccgcaggaggttatggaaattacccagtccctgcgtgagaagtacaaggctatttcctacaaccgtaccgactgccaatacctcacggaaacgcagtatgccgaatccggtcccacaatggatgccgttatccgcaacattgggtttcgcccgaaacagctggatatgactttgaaatccaagtgcttcaacgataagtatacgacggatagtggggaagcacacacggccattatcccgcagaatatcagcgtggatatccacgcaatgacggaacctgaacgcaaggtttacctcgccatctgccagtattacatggcacagttcatgccgcccgcaaagaaagagcgctcggcacttactgtcaaactgaaagatgggggtacgctcagcgcttctgcatccaaaatcatcgagatgggatacctgacactcttcaaaaaggacggtatccgtaacgaggagagcgccctgtgcgcagtccctgttggaacctatcagtgcgacgtccttgacgcaagcgtggtggagaaagagacgaagcctcccgtgcgatatacgcagaacacgcttgttgccgatatgtcctgcattgccaagtatgtcgagaataacgaagtcaaggcgctcctgaaggagaaggataaaggcaagcagggagagaatggctctatcggaacacccgcaacgagagcggctattgttgttggacttgtgaatcacggatatctgaaggatgacggcaagcgcgttatctccacgccaaaggcccgcgagttctaccgtatcctgccggacgaggtgaagaaagcggacatgacagcctattggtgggtcatgcaggaggatgtccgaacaggcaaggacgactatcacattctgacaaacagcgttctggagactgttcgaactatcgtacataccaagtacccactgctatctgaggagctgcgcagtcagcttgcagccgcctctgggcgtggacagacactcggcgtatgcccccgctgtggaagcgctgtcattgaaggcaaacggggcttcggctgctctggctataagcaaggctgcaagttcattatctggaagacacagaaaacttcgctgatgaaggattgcgtcattacggcagccaacgtcaaggcatggctgtctgaaccgtgggtaagtctgccggatggaaaaaagaagagcggaaagactgtaaagctaaaaaagctgacatccaaggcaggaaaccactttgagagtgaactgttcctgttggatgacgccagtagcgagtacggtcccggcttcgtgttcccggagcaggacgaaaaggaggttcttggcagatgtccgcgttgcggcggtgatgtgacagagtttccgtccggcttttcatgcagcgggcatgagaatggctgtggttttgttatctggaagaaatctaagctgaaaatgctcagcaagaccactttcacggcaaaggatgtccgggcattcctactgggacagtccgtgagaaaaaccactctgctgaaaaagaacggtacgaagttcacggcttcccttgtcatgcaggacgacccgaacagtccatacggaccgaattttacgtttggggaggggctggacagatga

SEQ ID NO: 2456 - DNA, 750 bp, Unknown
  Unknown gut bacteria
atgtggtataatgagaaccaaagaaccagggtgcttgtattctcaagaatacaggcagaaaggagaatttcgatgataggaaagcaggcaaccatctatacagacggctcttgcatcggcaatcccggacctggcggctgggcggctgtcatcctttgcaatgggaagcagatagagttgtccggaggcgcgagcgacacgacgaacaaccgcatggagctgatggggctgattcaaggattaaaggcgctggacaaggacacgaccggcgtaaagatatacagcgactcccagtatgttgtacgggcctttaacgacggctggctgaaaagctggaagcggaacggctggaagcgaaaggaaggcccggtaaaaaacctggacctctggaaggagcttgataagctgacagcacaacgcaaatgcaccttcatctgggtgaaaggacacaacggcaatcagtataacgagctgtgtgaccagatggcctgtgcggagagcgcaaaatacgcggacggctgcggcgaggaagatgataggcctgctgacatcctgttcagtgtggacgatatcctcgcagcactcgacgaggtgctgaaagaggcgcagaaacgggagcatggtgttgagacgccatgcggcgggatggagctttgcgactattgtagaagcgacgacgggcagttcctttgcgcgaaggcgtttgtccgcagaagggaattcttgagcaatggaatggattcagaataa

SEQ ID NO: 2457 - DNA, 1869 bp, Unknown
  Unknown gut bacteria
ttggattaccacactttttgccaaaaattcaatatttgcggactcaacgaacagcaggaagccgctgtccggcgcgtgaatggagcaacgctgctccttgctgtgccgggaagcggaaaaactacggtcatcgtagcgagaaccggctatctcatgtatgtcgcaggcgtaaagccggagaatatcctgaccatcacttatacccgcgctgcggcaaaggaaatgaaggagcgtttcataaagaagtttgccccggaacggataccggcattctccactatcaacagcttctgcctgtccgtcatcaatacctgtgcgaaagagaagtacattcatgtaccaaagctggtgccgaacaacgagagcatcgtccgtgctattgcggctaagatgcttccggagtatcccagtgattcacaggtgcggtctctcgcgcagaaggtgtgcaaagtaaaaaacaagctcatgacctttcaggaaattgaggccatcgaagaaaacagccttgatttttctgctttttaccaggcgtacaagctctacatgagcgagcatgatttgatggattttgatgaccagcttctcatggcaaatgatttgctggatgaatacccggacatcttacagcgggcgcatgagaagttccgctatgtgagtgtggacgaggcgcaggacacctcgtatgtccagcaccttatcgtccagaagctggttgggcggaatggcaatatcttcatggtcggagacgaagaccagagcatctacggcttccgaggcgcgtatcctgccgcactgctggacttccagagcaactataacgaaccctgtatcctgcgtatggagaccaattaccgcagcgacaggaacatcgtctcagcggccaatcagttcatcaaactgaatacgagacgactcgacaagaatatgcgtgcccagtcccaaaaggacggagccatcgtcgtgacctgcatcgaccgcatggaacagcaggcggagcttctgctggagcgcatccggaatcagaagccggatgaatctctggcaattctgtatcggaataacgactctgctatcccacttatcaatctactccagatgaacggcattcaggttcaaaccagagatgcgacgaagaccttcatgacaaactacgtcattcgggacctgctcgactttatgctcctggccctgaaccctgctgacacctccgcttttgggcatttgtactacaaaatgggactttacatgaagggtgtcaccgccaagcgcattatcgaggcggttgaagaaggggagtgccggaacgtattcagcgccgcgatgaaattcgcgggcggcaagggagacacatggaaaataggatgcctgccgagggacttttcagacattgcgaagaagaagcccgtcgaggctatcgactacattctgttcgtgctcgactattggaacaactggctgacgaagaaaattgacgccggtgcttccgagcagtttatccgcctgcgtatcagcattttgaagatggtagcggagaagtattcgaccattccggactttcttgccgcactcaaaaacatcacggaatataagggctgcgaggattccaatgtgaccgttaccaccatccattccagtaaaggtctggagttcgataaggtcatcttaattgacatggtatctggcatcattcccggtgacagcgacgaccgcgacgcggaggatgacgaagaggatgcgcgagcgttctacgtcggagcgacgcgggcacggcatgagctggaaatcatcacctgccggaagatgtaccaagaaaaactggaagtatctgagtttgtgccgcgcctgctggcggcggggaaaggagactga

SEQ ID NO: 2458 - DNA, 834 bp, Unknown
  Unknown gut bacteria
atgtttgattttgatgcaggtaaagaacggctttctatcctgagcaagtatgtccgtctgccgcgcagtgccgagcacggtgaggtcacggcatcgcttttgtatgaacgccttgtcatggccgctatcgccgcgtctaagactgaagaggatttgggcagaatcttttccttctcgtgggacactgtgcgttatttgaccaatatgaacctgtccaatgccgattttgccaagctgacgcttgccatctttgaccggcgacccattccctgcctgtttgtccaacaaaagaccggggactggtttgaaatgccgatgatttgcgctatcgaatgcggtgaagacgcaggtgttcattttcgcctgaatgaattcttcatcaaaacctgtatcccaggcggccgcagacgcgctgcaagcgccgcgtcactctatggcgtgtccgtatcccaccgactccatacgctgctcacaggggcgctggaggccggagaaatggtcatttcgtctgagaggctcagagaggttctccatctcggccaaaaagaacctgtcgcctatccggagaagtacagccggtataaggacctgttccggaaggtcattcgcccctgctgtttggaactgaccggcatgacggacatttgcgtgaagtccgtcgagccgattgggggaaattgggagaaggctccgagcctgaaggttgctacaaaattcgttgtggagcggcagccggtatctttgcgtattccaaaactctgtattggggaaatcacgccttgtgatgatgcggccatgggaactgcatatcagcaagtggaaatatgcgcatga

SEQ ID NO: 2459 - DNA, 1101 bp, Unknown
  Unknown gut bacteria
atgtctgaagaaaaggccctttcgtcagaaaaaaataccgcagagcgccccgctcccttcgctgccatgaaaaatgaggtcgaattcacaagcggaatggagtctgcctccgaacaggagcagaaaaaagtcaaatctattctattggaaattgaatccgagctaaacgcctacgaccgggcaaccggcttaaaaaaaatagccttcagcagaaactttcatatccgtcccgaccttctcgaaaaaatccgcagcatcagcgatatccgcatccagcggggcatcatcaattattacattgattctgcggttcatatcaagacctcatatatcgccaatatgatggacgtcaagaagcgcgagaacggtctgacggcgaaggaaatcgcgaggacgtgcagcatcacagcatccctgctgtcacggggcattaaagacggagcgattctgctgccgcccgcttcgattgccgccttctgcgatatcgtaaccgggcagtctgtggcggaaacctttttcgggatgccgccgaaaatcatgctccccctcaatcttgccgaggtcgcctaccggctccagataacgactgacgtgcaatttgaagctgcggaacgtatcgcggaggagcaccatattcagaacatcggcatgacgattgacagcgtgactatgtgggagcgttttgtggaatacaatacggaccgtgggttcacagaaggaagcctcggtgctgtcccgctccgtcattatgaaaccatcacactgaggaagctccaacaggttgccgaatcagaaaaaacagagtctgccgctccgcagacagggcgcggacgccggaaaaccatgcccactccgtccggcatcgctctgttcggatatcggtataacatttctcccgactacttcctcgcacgggattatgtgcttcataaccacgtctttatcccagggcgtttctttacccatgacatcaactccgatactcagaagtgccaggaggtcattgacccgcgtatcagacgtatcttgggcaggttgctctgtatgcggacggacgagagaatgaccgtgtgcggtgaaatcatcgcaaaaacgatataa

SEQ ID NO: 2460 - DNA, 873 bp, Unknown
  Unknown gut bacteria
gtgagcgataagcgtaacgaggacttgaaacagttcattattccagaaaattttatgggagaatccagactatttcaagggcagttaaagacacgcaatgtagtggaaggaggattgatttcgggggtattggcaattttcttttggaatgtcatttcagttcctatcaccacaaaaatatccctggtcatattcctttccgcaccacttggcctgcttggcttgtttggagtgaacggcgacccgctgtccacctttatcaagattttcttttcatggcgaagaaaacgggggctgatgctgttcaacaacgaagcacgagcgttgaaagaagcccccattaagctcatgatgtcggaagatggcatgggcgacaaactcagggattttctggataccagaaaggaaaagaaggccgccgaacgggcgagtcaggagatggttgaaggcaaaacattcgagtttgcacctgacagttcacttgagggcaactacattgatgaagatgacgatggcgatggaacgccgagcggcagcgccggcaatcgccataaaacaaagcacaaccaatccttcgttgaagtggaagtcctggaagaggatgacgatacctcgttggaactggacggatttacggaggatatcgacagcagcaccgttgaggaatctggcctgccgttgccggatttgggcggggccgacgatgtggaattgagcaacgatgacactaacgagatgcctgacgccgaggaatctgacgataatccccccgcgtgtgaaacgcaactggagcctgcggcagaggataattctgacgccgaaggcgacgcggatggggaagatgaagaacttgacgaggaggatttgttttaa

SEQ ID NO: 2461 - DNA, 1197 bp, Unknown
  Unknown gut bacteria
atgagcagcaagatttttgacgatttccaagaaatgtgccatgacgagtcggaatttatcgactctatccgggacatggaaaacaacagcgagtggctccccgaaatccctcgcaaagagcttcaggtcattcctctggatgggccgatgttcgtagcggacgctgtggcaaagtatggcgttgaccatgatacggcacatgataccgccgtcaacgatttgcatggtggttacggtacgaacctcatggttcagtatcagggcacaacctggtgcctgcgtgataccggtcgtgcgacactctacaccaccgccggtttgattggccccgccaatgcgaacatggtgaaagcggaagggtttgccgaccttgcgcagtgcttgaatatcgctctgcggtatgccaagggaaacgggcttctcctgctgcgttatggcaaactgtccgcgctgcacagcggcgcatccgacggttacgccattatgcgcatcagcgagttggtccgtatcacgaaggagaagctgaacaaccgattcggcgtcccgaagttcaaggaagggttcaattcccatagctataccagcgctgtgtgggagctgcccgacgtccgtgacgacctcattgacaagtaccagaaggcgctttcgaacgcggtctcccgcaatcatgctgtcaactggatgcccgttgttcgactgtctaccagcgacacagcgaccagttcggcaattctgatgccgaagctgatgtccccaggcggggccttctccttcgccattggaaagggcattcgcgtcgagcacaagaagctggcggcagggaagtacggactggagaagttcgaggatgaagcggacggactgtacgcgctgtttgaggatggcgctgccatgatgcagaagatgggaagcatggaaatctccaatcccgtcaactgcctcgtcggtatctgctcctacctgaaaattcccagaaagtacgctgacccggcgcgtgaggaggttgacaccttcgttatcaactcgccgcgtatgtctgcgctggacatctacctgagcatggcacaaatccccacctacgccaagcacgcaggtgcgagcgatgcgaaggttctggagttggaagagcttatcggaaagacgctgaacctcaactggtccgattatgacatcggtggaacagttgcttggaagtaa

SEQ ID NO: 2462 - DNA, 915 bp, Unknown
  Unknown gut bacteria
atgaatcaggaaatggtaaaagctgaaaagcgattcgcaaaccacaaggcacgcctcgacattctggacgaaaacgtgcgcgttctgaactggagacagccagggacgccggcgtacgcgattcgtgcggtgatggacggctatcatgtgtatatcaccggagaccttggctctgcggtcatttgcctgacggagactgccactttgaaggctctttccggctactggaagaaacccggctatttcatggagaagtttgtctgcacaacggacgactacttctttgattacgaaacggccaagggtgagcttcgtgagcgcaagaccatgttgctggaagagtatagggacaatcatcccgatatgctcgcaaacggagaaacagagtatcaggacgacctcgacgagagagaaacggacctgctgggcagcttcaactctgagaagggcttcgtggcaaatcccgttgccttctccgcatggctggagatggacgaggacggcgtggagaccgtcccgtatatgggacgaaccatcgcacaccgcatttggctgtggctggccgcgttcaagatggcctatgaggcgcttcaagacacctccaccgagcgttacacgcaggagtacctggacgccattgagcggaatactccaccccgcaacggcgcacccatcggccgagactccttcgagtgggccggatgcgcagaagagttgagtgtctgcaacgtagcacatctgctggctgccgccaagcggacgccgggatattttcaggttcgttccgcgctctgcggtatgcctgtcatcagagagcgttatgcggacacaatggcactgctcaacaaggtaaagggtacagacgcctacgatatccttgcccagctgatgcagcaggcggaaagggaggcgtaa

SEQ ID NO: 2463 - DNA, 450 bp, Unknown
  Unknown gut bacteria
atgtatcacgaaattaaaggcatcatttaccgcgtcaatttccagtatggcagctgcttcgtggaatgcgacgaagagaacgctcaggaggaactgtatcgcttctgcgcgaagaaagcggcgtccggcaaggtcatttcctccgtgaaccgcatctttgaggacagcagcagtacgccccgtgtatcggtgctctctcagcctgaatacaagcaggcgtaccgtgaggagcttgcccgcaaggaacgaggagacctggaagcgggtgacagagtatacacccctcgcttctgtaacgtcacactggaggcagtatacggcacagagaaggagcttcgtgccgcagggtacaccgaacctacgcattaccagaatgaccgctatgtaattcgcggcaagtccaccggcttcaaccggatggtattcgctgcggcggtcagatacgcttaa

SEQ ID NO: 2464 - DNA, 1338 bp, Unknown
  Unknown gut bacteria
atgactacccatatctggaaaaagatgctttcctcactgctgtgcggtattctctcggtatcctgcatgacagctaccgtatttgccattgacggcaagagcgtaagcggcgcatttggtgagcattgggatgaagtccaggaatcgtatgaaacctccttcggctgggactataataagtatcttgagaaggactggacggatgacgacaccggaaacgaatatgagcggcaagcagggtatcaggaagagtggtatcggaataacattctgaccacaaagcaataccttggtgtttcgactggagaaggcggaaatggcagcaatatcgttgaagtcgcgctcagccaactcggcttggatgattccattgaaatcccgccgaactcgaattatgtcaaatacaatgactggtactatggcagccaccgttccggacagtggtgcgcggcgtttgtctcttggtgcgcaaatgaatgtgaccttttggaaaatacaattccaaaggatgccagttgctcaagtatgttcaagaaactcacgggaagatacggctacgcatactatcccgttcgaagcacaaccccgttcggtggttcttatacaccagttccgggcgaccttatgtttttttcagagactggtaatctaaggctggctaagccttttaatcacatcggtatcattgttgaggtggatgaaacgggatggtacacggtcgagggcaacacaactggcggcggtcaaatcccaggcggcggggttgcaaaaaaccactatacagcatcgaccacatacaaagccgcgaaaaacggctatatcgttcatgtagaatatcctgaaacagcattttgggaaatccagggcggcaccaacaaggagaaggtgttctctttcctgacagaggagcttggcctgaacaatgctgctgcctgcggggttatggcaaatatccaaaatgaatctggttttaacccggcaagacatgaggataaaaacgcatacggagatggactgggcgaaggttatggtttatgccagtggtcctatagcagaaagacagcactactgagttttttgcaggaaaatggttttgctgaagactctatagaaggacagctctggtttttcaagaccgaaatcgaatcttcggagcgtacagcgtggaacgccatcaaggacctgcctaatacatcagatggcgcgtatgaggccggactcctgtggtgcctgaaatttgagcgtccgcgtgatggcgtcggagattctgtggagcgaggcaatctcgcgcaaaatacatactggcccgcttacggcggacggcgaggaggtaagtga

SEQ ID NO: 2465 - DNA, 2277 bp, Unknown
  Unknown gut bacteria
gtgaccatgactcaacaacagcagaatctgattcgcagactgaaaatcgcattgctggtagtcctcgtattgtccatttacatgacggggattgttctcagcatttccgtagtgaagtccacgctcaacccgttccgtttaattcgcctcttcggtgagtacggctttccgtggaagatgttcctcggctgttttcttttcatcggtattggcatttccatcctgatggcatactccgcttccgaggaagcgggcgtcgataagatgggtcgcttgttttccatggcgattggccgcaagacatacggagaagcgcactttgaggacccgaaagaatacgaggatgtcgccatcatccagcatgagccgcaggcagttggcactatcctcggacagctggacgagacaggccgctaccccattgtattccgagaggataaaatgaaccgtgcgaaccggcacatcgccgtcatcggcgcgtcaggctgcggcaagacctatacctttacaaagaactacgctttccaggcggtaaaacgccgggaatccctgatattcacagacccggacggcggtctttacgcagatatggcaaggtacttcatggacaacggatatgtcgtgcgacgcttcgacctgcacaatatcagcaagagcgacggctggaactgtatggactcacttttggcagacccggaacgtattggcgaaaatgcagagatttttgcaaatgttattatttccaacgccggagggagtgctggcatttacgagagcgggccgaaatctcttctgaaggcgctccttctgcgcgttgcgcttggacatgactacccgcctgagaagaaaaatatcaactctgtccatcagatgctcaagaacccagggggagagacatatctggatatgatgtttgacccggacagtcttacgccggaggaacaaccctgcgtcggaccgtacatgaccttcaagcagtcctcaccgaatcttcgcggcaacctcattgtgaaccttgcggcagatatcggggttatggatgacgcaaaagtgcggacgctgctctccaccccctgcattgatatgtctctgcccggaaagcagccttgcgcttatttctgcattttccctgacagccatgacacctacaaattcatcgtatccctgttcttctccatgctgttcattacccttatcaacgacgcggataataacggcaaggaccgtaagctcgatgtccctgttgatttcctgctggacgagtttccgtccatcggcacgattccggattttgaccgaaaaatggcgacgattcgaaagcgtgccatgaatgtctgcatgatatttcaggacatcacccagcttcagaacaactaccagacaacctgggcaaccctcctgagtaactgctcgacattagtgagccttggtatcaacgacgaatttaccgcgaaaatggtgtcctctcgtatcggtgatacgaccgtaaacgtccggaccaaccagcataaggcgatggaaacgctgctgaaaaacaacgagttccttcacaactggtcatctggcgaaggtaagcgtgcgctggtggggctggatgaagcatttaagatggggaagaacgacagcatcattatctttcagggtcataaccctatacttgcgaaaaaatacccccacacgcttcatacggacgccaagaaactcagcaattttgacttccgtgaaatcccacccatcaccgacaaagaggggcgagagctgttttatcagcgtcagcaaaatattctggacactttcaatatcacgcatccgcacatcaacgaggtagaccgttcgtacacggggatgtgcaactcgataccagtacaaagcatttgggaagagagcaaggatgccgttattgcatacgtcaaggagataaataagaaaggctccgatgacgatgtgatagaggtcgaggactgcggtgatgaatacatcgaggtagacgagacagacgaggagcaggcggtcgaaccttcagcaccacctgcacagcaggagccggtactgtccgttgacgcaaagccgaacgcagatatcgacttggaaagcgccgaggacgaaacagaaccgcagcaggaagacataagcaaaccgaaggaagcccccacgcctgccgaagcaaaagatgtagcgcagggtgggaagcgcccagcaccgccgaagcgcagcttcagttctacgccgactacagggaaaccgagaatgtcggggaagctgccggggatgcggtaa

SEQ ID NO: 2466 - DNA, 2421 bp, Unknown
  Unknown gut bacteria
atgaataggaaaaaccgtgtgtgttccgccgcactctcggcagttctgacgcttacgctggtcacagcaccggcacaagctctcgacactgctggggcggagaggacagaagggggctatgccgtaatgcaggccgtgtccggcctcagtatcggcgaaatcgacagcagcggcatcatctacaacggaaaagcacagacgccgacaccaaaaatcacagtgggcggtacggagctggttgctggtactgacttccggatggaatacagcaacaatgttcacgccggcacgggaattgcgtacattctcggaatgggaaagtatgcagggtatgttggcagctgtgagttcaccattcaccccgctcagttagtcgtgaaggtggacgatgtgcaggatgtcaaggacccggcctcctacacctacacgattcttcagggggcacttgcttccggagattcgcttggacagccgcagtattccgtgaaggataacgggaacagcaccaagacggtcagcgcgaccttccaggacaacgccgattacgaaatcacggttctgcccggtactctgacgattgtccaaacgctcggcaccgtcgttatcagcggcccgtccaatatcttctacaacggcagtgctcagacaccgaagcccaccgttcaggacgcttccaccggaaagacgctgacagagggacgggactacaatctcgtttaccgcaacaacgtcaatgctggcaaggccagcgtcaccatcaacggaatcggcagctacagcaaggtcagcgagatgcgtgagttcaccatccaggccgctcccatcacggtgcgcatccgcgacgtgcgttgcagcatccgagatacagacccgaccttccgctatgacatcaccagcggcagtctcgcccccggcgacagcctcggttcgcctcgttattccgtctattccaagacgggctactcttatggcccgtactttggcatccgtgcggaattccctgtgaacccaaattatgctattacggttcgtgaaggaacaatgacctactatgatgtcaaggtcgatgatgacgtcattagcacgaacttccgcgtagttgtcaatgatgtctactatgacggcacctatcaggagccgacggtaaaggtctatgaccgctataacaaccgtctgacggaaggcgaggactacactctgagcttctccaacaacagacaggtcggcacggcaactgtctttgttaccggcatcaatagttaccgaggctcgtatgccacggagcatttcgaaattctttccaatcactccaaaccgacgaatgaccggtataccatcgacgcttccgcttccgatggcggccgcatttctccgtctggcacgaataccgtgcgggatggtgcggataagactttcaacttctatgcgaacagtggctatgagattatcggcgtctatgtcgataacgagtatgttgggaccaagagcagctacaccttccgcgatgtcagcgaggaccacgagatttacgttgagttcgcaaagcgtaattcctctaactccagatatgacatcaccattcgctccagctatggcggtacggtaacgcccaatgacagcggcagtgtcaccgttgccagaggaaatagccgcacgttctactttgaacccgatgcaggctatcggatttctgccgtttatgtggacggttctctggtttccacccgcaacaatcagtacaccttcaccaacgtcagagatgaccaccgcctcgacgtggagttcaccagaatcaacgggtactgggacaatgccggcaacaggtatcccggtggaccgaaccatgactggactccgggctggaagaatccatactatgacgtgagcaactctgcatggtactacaatgagctgtgctacatgacttctcgcggcatcgtcaacggtgtgtccaacgacgtattctccccgaacacgcccgtttctcgcggtgagctggttctgctcctgtaccgtatctgcggaagcccgaatcccggacgtcacgcctacttcaacgatgtcgctgcttcctctccctttgctcatgcaatctactgggctgcggagaacggcattgtcaccggctatggggataactcctttaagccgtatgccgccgttactcgtgagcaggcagccgctatcctgtaccgttacgctacctaccgtggcttcgcttactatcaggagactggcgtgctgaacgcttacgctgatttctacgcggtttcttcttacgccgttcgcccgctgagctgggcagcgaccaatggcattgtcgtggggcagtcgaaccaaacgcttggtccgcagtaccacatgacgagagcggaaaccattgtcatgctctatcgcttctgcaccatgttcggccagtga

SEQ ID NO: 2467 - DNA, 591 bp, Unknown
  Unknown gut bacteria
atggtgaaccgcttttgggaggtagtcatgccgaagaagtcaaaaattattgaattcccgcatctccgtgccctgctggggcaggatgacgccaatcgggccgaagatgccgcagggaaacaggcttcggactcggcaccggaaccggagggggagaagaaatctatctggcaggagctgcgggacatcgagctgccgaccgccttgcagtccaaggaagtcatgctctgtacggtcgcggtactgatgacgctggcagtcatcgtgttgtccatcacgcttctatccgtgcggctgctcatgtttcttcttttccccgtctatcttctgtactgtgcggtttctctgcggctggattttaaggacggcactattagggaactgccgatgatttgctacagcgtacagacaaacgcagtttccaacggattgaaaggctccacgaaagtgtgtttccggacagacgatgatgttccgtcttatttcacctttacaattccccgcaaggtgacgttttatccgaattgcgcatatctcgtctacatcaacgaaaaaacaccgcatctgttatatgcctatttgcagatgtga

SEQ ID NO: 2468 - DNA, 345 bp, Unknown
  Unknown gut bacteria
ttggaagtctgtgggaaggagggaggcactgtgaagcagacatttgatttgtccgccatcggactcaaggagtgtcatttccgaccggaacgcttcggcgacgacattgtgttcgccgcaaagacggcggatggtactcgcgtcagaatcccatttgccttcgcggagaaccacccgtatgttgtgtatcgcgtgacgcagtttggaaagaggccggtctatctgggactggaagcagagcttctgtccagaggtttctttctggaggaaactccattcggaggctatcgcattaacactgagaaaatttttgaccacatgggaaaagagtcctcgctcatttga

SEQ ID NO: 2469 - DNA, 372 bp, Unknown
  Unknown gut bacteria
atgccggatgcaaagagcagcacggtcgtagtgcagcgcggcgtctacacggtggccagaaaaactgtggacacggagggcaacaccatccgggaaacaccgccgcaatggcgggaagacatcaccggcggctctgttatcgtctgtcccatcaattcggagacagacgaaccgctgtgcgacgcggaattgttttccgccctatcacaggatgtgcttctcgacagtctcggaaaggcgctgggcttccactggccgaacttcgccgccatctttgagaagatgcgggaaagcgaggtggatttctgccagttctgcggcgaggacctgcaaaagtgtatgctttgccccttcaattcctacaacaattag

SEQ ID NO: 2470 - DNA, 894 bp, Unknown
  Unknown gut bacteria
atgaaaggagggagttttttgaacgaagaagagaagttgaaaaacaaagaggtctgcgataaactgactgagcttttttcgagagacgtccggtctatgaccagactcggcgaggcttttttcaagaaagggcgtaaacacagcggccttgggaaatactccgacctgtatggcaaaagctatccccttgccgcagataccgagacgaatttccgctgttcgctggaccgattctcagaggatgacagcaatcgaatttttaacttccttgctgtcagatacggattcaactctgacagcctgcgtcgaaagcgcattgtgtgggccaaaggtgagattgaaggattgcttcaaattaccggtctgtcttatcaggagttcttccgggatgttctgggtatctccattccaatgccgtcctcccaggagcatcagttgatagaccggatggacaacataggcgatgcgtcccttgccaagctgaaagctatcgtggaagacctcgacccgcatctggagcgtgcggaggatggcagcgtttactccatcccctccgccagaatcaaatctctcgtgcggtataggaaggctgcaacggaaaccaaccgagagttcattcggaagctgcacggcgacacggagggcacgatgcagaccctctctgtccgcagaaccgcctttaatattcagcaagtcgttgaggctgcggaacttatggatgcgcccctgttttgggtgctgtgctgtgagaacttcccgctgtatgcgaagcgcatcgaaaccgactatgtgtttgcactttacaaatttctttctctgaataaccgtaagctgtttcagacagcagtggagtgtatttccgccgctgaaagtgaggtgacatccaatgtctga

SEQ ID NO: 2471 - DNA, 1107 bp, Unknown
  Unknown gut bacteria
atgtttcgaggtctgcgaaggacagcgctggcaattcttactctggcgctgatactgacttttcccgttacagcgtctgccactgacgccggcttttccgatgtgccagaaacggcaccgtatcatgatagcgttgtctatctctcagaacggcaaatcgtcacagggactggcgtcggccagttctccccggacgcccccattaccgttcggcaatgggcggtcatgctctgccgagcctatggtgtccaaatgaaaggcaatggatggatggagcagagtcagagcggcgtggatgctgcttacggcaacggttggctgagtgagactgctgtcgtctcaccagaaacacaactctgccggagtgcggttctggaaagtgcgttcgatgccgcacagataccggtctacgacaatgtactctatggagggaaggcacttagccgtgaggaaaatgtcctgcgtgttggacaagagctgggcttatgttctgtgtcctcgaccgtaggtgaaagagtaacgaggggagaggcggctgtctatctatatgagacattgacacatcaatttgtggtcgaagcgcctaaatatccggtcgtgtgcgaaaatcgctctgacgcgaatctcaacgattatcttatggaactgcgctatcttccggataccgtcctcaatgcgttcaatgagcacggatggaagctcgttatcgaccatgcgtatacggcgaaaatgggcaagctgtataatgtgtcctgcaccggcgtcaccagctatcaggagcgaaccatttatgtttcggaagcgggggcagtcctgcatgagttcgggcattttatagaaggggaactgctcagctttcctgccagaagtcaggaactcttcaacgcagaagcaaaagatgcacccttccgcagctatgccaaaacaagcagcaacgaatattttgcagattatttcgcttatctgctgacacattcggatggcagcaagtccatgcagcttctgaaaaaaagcacgcccaaaacatacgaatatttccactcactcacgataaacggtgaaccgcttttgggaggtagtcatgccgaagaagtcaaaaattattga

SEQ ID NO: 2472 - DNA, 2142 bp, Unknown
  Unknown gut bacteria
atgaaatacgaacaccagctcaggaagctgagttctgaagagcgcaagaacttgagttccgaagaaatcttccactccgctgagttttccagctatctgcaaaagatgggggagacgctgttgcggcattgcggcatcactaagcgactgtccctgacaattctgccgacaggcattgcaccaggctggacggacggaaagaaggagtatctcgtacctgaaaataccatcacggaggcgtacaatgacatctatgccaagtttacggctctgctgggtatccatttccacgaaattgcacatatcatttattgcgattttgcagaggagcagaaggccattgataaaatcaaggccggagagttctacggagacctgccggtgccaaagactcaggcagaggttgacgcattgactgaaatgaaggatgcgcttcagaacagtgcgtaccggccactgtttcagcagattttcaacgatgtgaccaacaccattgatgacccgcacgatgaaggcaaaatcatcgacgagtttggcggcatagtggaaaagggaatcgcaacatcgcgtgaggccctgtttcgcagtttcgattatgcggaaaacatcctcgcaaatgataaggcaaccaagctgcaaaagctctatgccctgatgcttgagtttgcccgattcgaggatgtcttcgcaagagaccttgaacagtgcgtgtgtgacaacgacatcatgaagatggtcattgacatggcaaagcccttgagtcaggccagatggacagatgacgttgcatatcgttttacgcaaatcaacgcaatctttcttatcatgtggcccatcatcaaagaggccctggatgaagcggaacagcaacagaatcagacgggagcgggaaatccccagagcaacagcaacggcgattccagcgatgggcagaccggctcaaacggaaatcctggaagcgggaatccgaacagctccggcaacactcagccgatgaatcattctgccgctgctattcaggctgttgtaaacggccttgttcagaccgcatcgaataccggtgcgaacgccgccccgcagaaccagtccacgtccaaagttgcttccgcaaatcacaagcaggccctaaagggtcagcaggcgcaaggcggacagaaaactccctcccagacgaaggcttcggcgaatacgaatgggacggacaagcaaatcaaagaggccttggaagctatcgcacggggcatcagcgaccagaaggcggaggaaaagctggaggcggacattacgtccgacctgatggcagaaatcccccagttggagcttggtcccacgcatcgaggccatatcaggccccatcgcatcttaggcgttacagagcaggacaaaaagctgtatgagcggcagatggctgacctgaagggatattcccgcaggcttcagaaactcattcgggaagctctggctgatatccagcagggttctatccttcatcaccgcatcattggcaaccgtcttgaaatcaagaatgcctatcgtccggaccagaagttctatgccagcaagaagctgccgcaggactatccgtctatggcggtcagcgttctggttgatatgtccggctccatgcagggcgcacggatgaactccgcaatgcgggcggccatgctactctatgactttgcgacgggactgggcattccagtcatggttgccggccacaatacccagacaaggggatgtgccgaatactatgtgttctcccgctttgatgccatcgggaagcaggatgccttccggcttgccaaactgagcacagggggctgtaaccgtgatggcgctgccatcgcagcctccgttggccttcttgcaaagagaccggaggaggtcaagctgatgtttgtcatcagcgacggacagcctaatgacggaaactattctggcagtagtgccagagcagatatccagaatatcgtgaaatccgcacgacggaacggtatcgaggtttttgcggcagctattggcaacgacaaggagcacatccaggcaatttacggtgacggctttctcgacatcaccgacctgagcaaatttccgaagatgctcacagggatggtgaagaagaggattctgcgcaatatttga

SEQ ID NO: 2473 - DNA, 948 bp, Unknown
  Unknown gut bacteria
atggtaacaaatgtgattaccaagtgtaacggcaaggataaagtcgttgactttcgcgacaagctgagccggtcgctgcctgacgagtatgcgatgatgcaccagtctggcggcaagaaaaatggaggaaagacctttccctctgtcatcgaaatggtcatctgtgatttcacgaagggaacgggcgataaaagtgtcacctgttccgtgaatattgacccgaccatgttcgacgaatggctcaccgtttgccgctgcaatgtcggtacgatggctgttccgctgattggacgtgtcgcgaaggatgcgcagaagccatgggagactgttttggcccccaatgctgtcaatggtctgatgaagtcgattcatcgcactgccagcgttgcgaaggcttatggcagtcttctgagcaagagcgtaagcattgtggccaaggccgttaagggagcagaaaagaaggatatcctcatggcagccggcacagttctgaaagaagcccgcactgctatcgcggatgcggacattgggactgcgctcaaatttccgcaccgaatggactaccagtatgccatgtccaaggtcaatacctacaagaaaggcacggacggatttgcgccggtgtctatgctgacagtcacgcatgacagcgttcgtcaggacggagaccttgcaatgtatccttgggtcctgaaaatcaccaacggcgatgccaaggtgattgagcaggcgaccggggccacgacattcgacggaaaatccatgcgaaacaaggtggaggtatttatccaggtttctgaccgcgatatgtaccgcatgatgtatcgcgtaacacgcttcatcgaaacgtgggagaatgccatgtgcatccccgtcatcatcgaaggagagaacaaaaaggaggccgaacgtcaggagtatctggcacggcagaaggaaggagtttaa

SEQ ID NO: 2474 - DNA, 522 bp, Unknown
  Unknown gut bacteria
atgaaagaacgaaatctcaccaaccgcactgtatggagccgtgaagtgctcaagggttccctggaggggcttattatcgctcttcttttgttccgaatcctgttcaatgttgttgtggtgtccggcccttctatggtgccgacgcttgcggacaatagtgtgattctgacaaatcacattaagccgaatctggagtttgagagcattgttgtttgcaattcgagcggtctggatgaaaatatcgttaagcgtattattggttgccctggtgataccatcgacattgatttcgaacagggggtggtctatcgcaacggaatcgcgctgagtgaaccgtacacgaacaccccgaccaacatcgaatatgacgatggcatatcgtttcctctcaccgtggaggaggactattactttgtgctgggggataatcgaaacaacagccttgacagccgcagctccattgtcggattgattccgagaacggacatcgagtcgtcctatgtactcactatcatcgggtaa

SEQ ID NO: 2475 - DNA, 2493 bp, Unknown
  Unknown gut bacteria
atgtccagaaaactgaaacaagtaataagctgccaatctttctcgcccataagtgatgtccgtgacggcatcatcgtcacgaaagacgggaaatttgtgaagttgatggagttctctcctatcaactacggcttacggtcaaacgaggataagaacatgattacggcacaatatgcggccgcaatccgctcgtttccaagcgttgtccaaatcaaagttctgtccaatcgcgcaaatgtcgaacactatatttccggcatggtggaaagcgtgcgccatgaaaagaatgaaggaacccgtgaactgatgcgggagcaaatcgacatgatgtcagaatttggcgcgtcgcaaggcgtatcccgtcgcttctttctcgcattccagtatgaggaagaagagggattcgcacatcgttcaccatcatggaatgaaatcagaagcaccattacgagacaggaggacgccatcagaagcaaccttcgggcctgcggcaacattatgatttcaaggcctcacgatgacgtctatgtgctttccacgctttacgatatcatgtccagagcacagagcgcgaaccacccgtttgacgagagaatggcggatgttgttgcccgatatacggcggcaaacatcgacttcacgcgagatagcgcggcgcatcttcctgtcaatgatgtgcttgctccgtactgtattgatacggagtcaagtccccgatatatcatcgtggatggcatctactatatgtgctgctatcttccgagcaatgcctatcctgcgcgcgttcttggcggctggatgcagctgctggcagggctgggagaggggattgatgtggatgtttggcttcagaagatttcgccggagataattcaaacggcactgcatcatggcctgcggttcaatgcaatgcgcttccgcaacacagaaaccaccagtagtgactacgatgatgtgaaggctgcggtggacgcaggatactatctgaaaagctctctctcggccggcgacgaatttgcctatatgtctacaatgctcactattacaggcgaaagcgagcgagaaattgactacaaattcaaggaaatccggcgcattttcattgagagagaattgactctcaagccttgtactttccagcaagcagaagcgtttcgctccaccattcccgtatgtgagtatgacaaaaacctattccgtaagagccgcagaaatattctgtgttccgattttgcgtccacctatatgttcacatcttcggagctgtgcgataaggacggcgtgatgctgggcgtggatgatgtgttcaaatcaccggttctggtcaacttcttcgaccgccagcaatacatcaatgccaacatcaatattgtcggctcctctggctccggtaagaccttcaccacgcaggttctggctttgagaatgcgggagaagggggttcaaaccttcattatcgcgccgctgaaaggcaaggagttcctgccgctttgtgagaaggtcgggggcagtttcattgaaatcaaacctggctccggacagaatatcaatatcatggagatacgcaagaaggaagagggcaacgtctacgatgacgatggtgcgttggtcacttccggctcgattttggcacagaaaatccagcagcttctcattttctttaagctgattatcccggacatgacgccagaagaggtgcagtatgtggatgacgcgctgctgaaaacttacggcaatttcggaattacccataagaacaagagcctgttggaccccaacgacaagaagaaataccgtaaaatgcctatcctttcggatgtatattctgagctggaaaagatgggcgcaccagcaaatcgtttgtgccgtttgctgacgcgatacaccacaggttctgcatcttcgttcaacgcgcaaaccaatgtgaaccttaacaacaagttcgtagtgctggatgtttccgatgcgcagaaagactttcttcctgtggctatgttccttgcattggattatgtttgggataaatgcaaagaaaatcggaacgtcaacaagtgtgttttcattgacgagacttggcgcttggtctgctccgatgcacctatcgaagccgccaatttcgtggtcgaaatcttccgtactatccgaggcttcggtggaagcgccgtcgctgccacgcagaatatcgcagacttcttctctgcgggaattggcaccgccatcatcggaaacgccaaaatcaaaatgattttgcgcagcgaaaaagaggaagcaaacgcgattgcggatgcgattggtctgaccgacgaggaactcaagcgtgtaaaaaccatggaccgtggaacctgtctcctgaccgcaaatgagaaccacattttcatcaatgttaaggcgacggatacggaagaatacctgataacgactgaccccaaagcaagagccgctgcgaagcgccgaattgagcagaagcgtacttgcgctgccttcaggcgctga

SEQ ID NO: 2476 - DNA, 540 bp, Unknown
  Unknown gut bacteria
ttgtatcgctttttctcttcgcagcttacgcaagcgcaggttgattttcttatcaatgcgctggcaagccaacgagtccttgacatcgacgaacaggactacgagctgatttggtttcaccggatgggcctgaaaacatcgaggctgagacctgaatatgtgaaggcgaaaatccgtgcgttttgggtgattgctcgtgtcggatgcgacgctattctggatgtaacctcgctggaccatccgatgcagttctccttcatcgcgaacacgttggacgagaacggtgaggagcggtatattccgtatgatattgccgtctgcaacaccgttgacatcgcaaaggctgttgtttacaagcgaagcaaatgcgaacggagcgccattgaggaggaagctacgcacatcgcactggtaaataataaggaaaccggcgaggcaattatgaaagaatgcctggacgaaaatagccgcctttaccgtgggtttgactgtttctgtacgctggataataacaatattccgaggtatgtctcatggtga

SEQ ID NO: 2477 - DNA, 1368 bp, Unknown
  Unknown gut bacteria
atgagttattttgaatgcaatctgcctgattcctgcccgcatatctgtgcgggaaaacggtcctacttcgaggacacggtgaaagtcattaaggcccgtatggcaaaactcgatgacgcgctcgcaaagtccggcatggacggcgcggcgttcgcgaagacggccaaaatcctgtttgacaacagctttgacctgttcgagcggatggacagcgtggaacttgccatgtgggttcagaacagctacgacgggaagcctatcgagcatcgcttcgagtggccgaatgctgaggtcgtcgttgactgcgctttcgtgcagacgaaagagtgggaggcccttcgtcacttcggcatcggcggctctgacgccgccgccatccgtggcgagagccggtacaaaacggcgcaggagacctaccacgacaaggtgggcacccctgaactcattccgtctaatgatgcccaggccgtcttcgagcgtggacacatcatggaagatagagtcattgacgcctttctgaagctgactggcttcaagcggattcccgaaacacggatgttccgttcccggaagtacccgcatcagacggcgaacattgatggcattgtcatctcgccggatggccgcatctttgtctttgaggcgaaaacgaccgtcgcggaaaactgggacgcatggaaagacggcaagattccccgctcttatgtcccgcagacgcgccagtatccggcagtgctggatgatgaccgcgtgcagggaacatacattggctgcctgttcattgttgaccttatcgttgggggactttacgtcggcagtgcgtacagcggcgagcagttcgtcgcccgctgcgtcgagcgcgataagctggcggaagacgaccagctggcaaacggagaagagtggtggaacacctatgtggagccgaatgtggagccggaggcttccggtatcccgaagaaggatatcgaagtcatccgaacctatcacagcggctatgcagaccccagtgccgatgctgtcgatatgacgcacgacttggatatgctggccgccgcaaatgagtggctcacgcttggtgaaaaccgcgtcgcgaagcagaaggaagtcgatgccatcaaagagcgccaggatgctatctctgaattgttcatgctcaagctgaacgacgccgtagagggacgtatcaatcttcccgacaatgagtttatggaagtcaaatggagtccgcgttcgagaacgaacgtggatatggaaactctgaaaatccgcttccctgatgcgtacaatcagtgtgtgtcagtaaatccggaaagttcacgggtcttcagcatcaaacggaaaaaggtgcgtactcgcaaaaagtga

SEQ ID NO: 2478 - DNA, 417 bp, Unknown
  Unknown gut bacteria
atgacaatgagaacattggtgcgttttgaatatgacattgagaacgtgaagctgttcgatatcgtggatggcggcgctgtgcatggtgcgttcaatggcaacctaaccatttacttcgacatgagcgaggatgggaagctgctggatgaatccaagcaggcgctccgtctggaggcgcggcgcatctgccgtgcgctcaagaaccgggggatgaatgctaccgtgtccatcctgaacgccgatacgaaggccgtatatggccgcgtgtttgcggagcaccctgaaatcttcacgcttctcctgtggaaccacgggagagggaatgacctgtcgaaggaacagcacgcgcttacgccgtccggcgtatacaaggcgctggagcgtatcctcacggacattcgttccaacgcggcgtga

SEQ ID NO: 2479 - DNA, 804 bp, Unknown
  Unknown gut bacteria
atggaaaaaatgaaagcagattacaaattcgaatggtatgtccaggaaatccctccacggtgcagaaaaccacgggatgttctgcacaccaagacagtcgaggtcaacatcccagagttccgggaagtcgaagtggacaaaaacgcacctgtggccattgttgtttacaagaaggattacagcacgaacaaaaaggttggagaagagttcagactctatgatggccggctttacgttgcaaacggcagtgctgcggagttcaagaaccgatatcagtgcgatggccgcattgagcgagaaggcgatattccaaaaaccgtaaagaagattgaggaagagtggctgatttgcgatgacacgctatatcgtgtgaccggcgaaccgatatacagggtttgcgaccagtttattctcacggatgtaatttgggaccgggaaaatatggaccctgacagatttcgcgcagacgagctttttgaagccaagagataccgtgacgcactataccctgaatatgcttgcaaagagaacgacgaggactacaactcgattgaagttcgcattccggatgcgttgaaactgccgacttacctgaatcgggtagacgactgccttgagaaaaatgcccgcaaagcgttgacacaagaattgggttttggagcactggaagaaggtctgtcgaacctgatggttgccattatgaaacgtgcaagaaagaatgaggagtttaagcggacgagttacatagcaccctatgaactggcggatattgcgcgtgaggtcattctcgaaaaattcaagtga

SEQ ID NO: 2480 - DNA, 2367 bp, Unknown
  Unknown gut bacteria
ttgtgttacgatatcaaccagacgctgaaggaggaggtgcgctgcaaacactccttcaccatccattcggcggacggcttcatggtcgtccgctataaggatgcggataccggtgagtatctcgtcgcgtgcggaagcaaccttccgacggcaagcgacatcatctacacccttcacggaaagtggggaatgagcaagaatgggaagtatggacgccaattcgaagtaagctacttcgatatggagcagccaaaaggtaaggcggccattgtctcttatttttgcagcttgaaatgcggtatcgggaaagtcgtttccgggcgtatctacgccaaatggggcgatggcgtctggaatgtactggagtctgacccgtctcaactcaaggctgtcaatggcgttactgataaaacagtaacaaagctgatgaccagactgaaagagacggagtttcagcggcaaatcattgcaaagctcggcgatgcagcggcggcgattacgccaaagatgctcaacgacctggtacgctactgcaacaagaatgagcttgacccgctggataccgttgagcatcatacttattccctgatgctggtgcgaggcttcggcttcgagaccgtggataggctggcgcgtgcgctgccggattttgaccccgcaaggtcggcacgccttatcgcatcccttgcttatattttcgagcaaaaatctatggaaggccatgtgtgcgttccaaaggacgaactgctcggtgagatgaccagggtgcttaatgctggcttccataacgcggtgtccgaggacaactgcaaagaggcgctgaacttagcgtataagatgaagaccatcaaggtcacagccaacatggtctattccaccaaatcctttgaggaggagacggggattgtcaaagatattcgccgcattatgagcgcttccgattctaaaatcacagaaattgatacctttatcgaagagtacgaagatgcgaacttcaagctggccgacagccagcgagacgccgtacacggtgtttttgagcatcaggtcgaaatcatcactggcggacccggcacgggcaaaacaacagtcacaaaggctgttctctatgtccatcagcaagtgttcggtggagattccaatgcggtgcttctggctccgacgggaagagccgcaagaagaatgtctgaggcgaccggctttccggcacagaccattcattctgctatcggttacaccggagtaccggagctggacaaccgcaacgagggcttcctggaagggaacttgtttattattgacgagtcctccatgatggaccagttcatcgctgcgaaacttctgtccatgattcctgatggagcaaaggtcgtctttgtcggcgaccctgaccagctgccatctgtcggtgctggtaatgtgcttcgtgaaatgattcgcagcaaggctgttccaacaaccagactgagcgtcattttccgtcaggcacaggataaccccattgttgggaatagcctgaaaatcaaccagggctgcacaaacctcacttttactaacacattctgtttcattgagcggtctgcaccggaagaaattctccgcaccgcctgcgcgttctatgtgaaagcggtgaagaaatttggtctggagaatgtgattctgctgaatccgttccggaacaagggcctgctctccgtcaacgagttcaaccgccagctccagaatcttatcaatccgcccatagaaggggaggagagcatcaagattcgaaagctggagtttcgtccgcgtgatttggtcatgcagacgaaaaacacggaaatcgctatgaacggcgatatcggcgttatccatgaaatcagcaaaatgccggacccggacgatatgaacagatggacttacatcgcgtctatcgaattcaacggggacggcaaacgccatgactatacgcctgagatgatgcaggaccttgaccttgcttactgcacaaccgtgcataaaagccaaggctcagagtaccaaaccgtcatcatggtggtatccgaggaacacaaagttatgctcaagcgcaatatcatctatacgggcgtgacgagagccaagcagaacgtcgcgttgattggtcagacagaggcgctcaacaccgccatactgaacaaccagacagatgttcggcacacccttttgggcgaccggcttcacgctgcgttcacggtgacaagtcgaaaagctgcgcgtcttcctgaaaaaggaggacgcgcagtttttttgtatattttcggcctttttggatattcagtcagaaataaattgactaataggtgtatatgtgggataatatatagagcggaaccccaaaaattttga

SEQ ID NO: 2481 - DNA, 567 bp, Unknown
  Unknown gut bacteria
atgagttattccattatctacgggaggcagtttgtaaaaacgacaaaaggcatcatcccaatgattttgagcggttcaaacaactgcacagaatttattcagggaagagaagtcctcgaacggaactggtatcccatgacgctgagcaacaaggataagcgcattgccatccctgcggaagagctgctggaacgggcgagagctatctcgaccggtgacggcgcggattacgaatttgcgaagcagggcggaaagtggctgtattgcaaggatgtgctcaagtgggttgagagcggtatcagaaatgccatgaacatcgaacgcaccaactttttccgccccaatacgcctttgtacggcagaatcgttgtatggggtggggacaagcgcgaaacagtccacaactgctactgtaagacaacacaggaacttgaggcgtttgccgaggaaatggaaagcgcgtggaaggtaaatggaagcgacaaaacggtaacggaattctacccgtatctgtcctttgagggccgtgaaccgctttccatcgaaaagatggcatccctgagtgat

SEQ ID NO: 2482 - DNA, 546 bp, Unknown
  Unknown gut bacteria
atgaaattgctgaaagactacgaatcctcctctctcacccttaaacgggttcgggaggtcatcgacagggcactggacgagctggagtatgactccaggttcgacgtcaatgtggctgccgagaacgcctattattacttggcacacaccgcctgttgggacgaggacttggccgcattccaagcccagctggacaacggctgcggtcctgacgacggtgccggggcgctgaccgcttatgagcgcgtcgaaatcctggccgcacaggtcgaacgactcctgaacgacaaggagacctatgcgtacagcaagaccatcgacgaagatgccctgctggacattgttgccaagacccatccaaggctgctggctaagcggccagccgatatgtccgttgaggatttcaaacacctctggactatggtagtttctgcctacatcgtgggcggacgcgactatgccgaggacgagttcatcaactatacggatgccatcggcgcgacgccagaggccgtcgctgcggttatccgggcgggcaatgaataa

SEQ ID NO: 2483 - DNA, 1755 bp, Unknown
  Unknown gut bacteria
atgaacgtgaaaagaaaatttaccgcatttgctgcggcttttttgctgctgcttttcgcaacgccaagctccgcagcattagaatttgagaccgatacggaggtgcgagacgcaacgtataacactgagccgactcagagtcttgaagccggcgtgccggacggtatcccggaagaaatgcttgagacagaaggtgagaccacacgggcgcagttcctgaccatgctggtgaacctcgcaaacccggagcttgatacggttcagagcacatcgttccccgatgttccggagaacgcatactacgcgcttcaggtgagctgggcaaaggcaaacggaatcataaatggcacggcggccggcgtactggagccggacacaccgctgacacggaatgaggccgctgtgatggctgcccgtctggcaaaggcgatgggctgtgacgccgctccgctttcatcccgcacgctgcttgcgtgcgctgacgccgcgcaggtcccgctttacgcgagaagagctgtgaaatggtgcatggagaacggcatcctgaccgcttcagaaaaaggattcgagccgaaaggcacgatgaatcataaagaagctgtcgatatgattctcgcactcggctgctggctccagaataacggacctgttgtccggacaatcccggcgtcagccgtggtgcaggccacagaacagcacgcagcgttgcaaaacagaatcaatgcgattgcaaaaaagtacggtgcggtcggtctgtcgattgcgtacattaaggacggccatgtatcagatacctttgcgtatggagaggcggttcgcggagtatcagccatgacagcagatacgaaagttcgggctgcgtccatctcaaaagtgcttgttggtatggcagcgagcctttccgcagaagaaggaacgatgactctcgatacagagctggacacctacctcggttttcccatccacaaagcacaggaaggagaccacattacagtccgttccgttctcacacatacatcttctctcagggcaccggaggatgtatcaagaagctatgaggggatgaagacgcgactcatgtcttcgtctgcgacacgcgaggtctgttccggcaacttggaaaactggctgtataacaactacgccttctctgcactggggcttgcggtcgagcgagcaaacagctgcacgatggacgagctgcttggacattacctctaccgtccactgtccatcgacgcggcattccgaacagggagtgtatccgatacgaaaaaactggcggtgctctaccgtgccgatggcagcacgggcctgtcctaccaggaaatgctcaaggctattgatgacgaactgcccggtacggacggcagtggattcgcaggcggactcaccatcagtgcctacgaccttggaaaaattgtggcgttgcttgccggtgatggcaaatacgagggcgcacagtacctttctccgtccatcgtctccacattggagtcacacggcgataaggctgtgtccggcggattctaccagtgccagcctctgcgtctgcgagccaatacctatgggcagagcagattgttctatcacaccggcagcgcatacggtgcgtacaacctcatgtgctacaatcctgacacgggctgcggcgtggtcgtacttacctccggagccagcggaaagaaagataccgccggcatctacgctgtgtgcggagaaatcagtaacctgctttttgccgcaaacccctga

SEQ ID NO: 2484 - DNA, 546 bp, Unknown
  Unknown gut bacteria
atgaaggagaaagaacccaaaattgcctcatttcggaatgctacgaccatctatatgggccatgcaaacggacaggatggggagtggaacctgttctacagcgaacactttgaggaccgctccaccgaaagaaactgctccattgagaaggctggaattatcctcggcaccatctttgaagacgccatcttcgccgataaggtctccgaagatatcgtgctgtcccgtgcttctcgccgccagtcttacgactatgttgagaagcggcagcgttttcagattctggacatggtgaacaaggtttcttttatcctggaattgtatccgagaacgaaggaaatctacgtcatcacagtcctcacacaggacagagaggccatcaataaaaaaagaaataccgttgtcataaagattcttccggctgttgagcgggaggatgttgtggaatcaaaagttgtctattatgattacgacttgcgcatccgggcattcaagaaactgtacgagcaggttatggatgcgtcctgcctgccttgcgaagattga

SEQ ID NO: 2485 - DNA, 1503 bp, Unknown
  Unknown gut bacteria
atgagaatgtgcggatacgcacgagttagcaccgacgaggaacggcaattagatagcttagagcatcagatggagtttttctcggattttgcaaagcagaatgggcatcatctggtcaatgtctacacggacgaaggaattacaggcagacagctcaaaaagcgcgatgcgttcaacaaaatgctgagcgactcaaaacttgggctatttgaccttcttgtggtcaaggatgtctcacgatttgcacgaaatactgtagacctactcacgtcgattcgacagctcaaatcgagaggaatcgacgtgatttttgtcaataacagccagaaagtgcttggcgaatcggagttcatcatcacgctgctcggcgctgtggcgcaggaggaaagttcaaacctgtctaagcgagtcaagttcgggaagaatattacatcaaagaaaggaagagtaccgccgcgaattttcggatatgaccggattgataacttcactatggaaatcaatgagagggaagcggaggtcgtcagagaaatctatcatctctacatcgacgagggactcggatgccgccttatcgccatcacactttccgaaaagcagatgaaaaccaagtttggtaacgattggaaccagaggaacatacggagaatactggagaacccaatttacagcggacattacatcaatcaccgctacaccgttgtggactttctggaaggaacgacgaaggcgctgccgaaggaacagtattaccaccatgaccgcccggaatgggccatcataacgccagaacgcttccagcaggcacaggaaatcttggagcagaggagaaaacaatacgcgaccgaatacacgcatttcactgggcgatacagcaacaggcatttattcagcaccctgatacgctgcaaggaatgcggacgcgccttctcacgaagagtgacgcattatccaaactccgattacatttactggcgatgtccaaccaacaaccagtataccgcaaaacgatgttccaacaacacaatcgtcagagaggatgacctaattgaaacactctccacctacctgagagaggttgtctctaacaaagagtccatcgctcaggaaatcgcacgcaagtttaaggaagcaaatgcggtggagggaagtaagccagacgctcaaacgcttgaggcgaaaaaggtcaagctgaaggcaaagttggaaaagtatatggagatgtacgccaatgatgtcatcacgatggaagcgttgaaaagtaagacagcagaaatcaacgaatctatcaatgtgattgatgaccagcttattctcctcgaaggacaacgcacacaggaaaggaccatcgaaagcatcacgaatgaagcgatgacggaaattgagcggtttctcagcctgcaatctgcaaccaatatggacctcagaagaattatagattctatcatcgtggacgacaaaaagcaggtgaaaatcaatctaaaaataacgggcaatttgtaa

SEQ ID NO: 2486 - DNA, 1014 bp, Unknown
  Unknown gut bacteria
agggcggcaagcggaagaagaattccaccgtcgccaaggattcctccagaacagaaggcctttaagataggcaggaggaatgaaacagtgaaaaaagaacgtctcgcaagtctcctgatgacgggggcaatcatggcgtccacggtggtatcagccagtgccatgcagttcccgcaggatgtctactatccgtctgatgacacagggcttgcccaaaaggtctacatggtggagacggagaaggaaatcgagcttcttgaccgcagctccttcacctacaagggcaagacctataattacctcgatatgaccgtggagccgcaggaggtccacgacgagaagaacatggtcaagaaggtatccggtgagtccgataccaacgataaggccaaaatcctcgcgactctcgaagtcaacctcgatgaagtgaccgaggatgggtatgccggcgagttgacgctggatgcgtctacgctgacgaccaccgttacggagtatggtaagggttctcagaagaagactgtgaccaagacgtatcccggtatgtctgacggcgatttgtcccttgtcccgaaaaccgttacctccggcggcgcaacccttcagctggtaaactgctcctggagtgaggatgcgcagtataatccgtatgaccccgatattggcaaccgctttactgcaaccgcgacatactccggcaaggttggctacagctatgctaagggttatgcctacgaggtcaattactatggaacagtggaaaaggacgaggttgagggctacctctgcacgctcctgttcgcaccggaggaagagccttctcattggtatgacgtttatctgaatgaggacggcacgaccaacggattcatggttctgttcaccgtactgttcttcgcaatgctggtcgggctgctgtattttctgtggcccattctcttcggcaagaaggaagacaagactgtgacggtcgaggagatttaccagaatcagccggacgagaaaaagaagtaa

SEQ ID NO: 2487 - DNA, 558 bp, Unknown
  Unknown gut bacteria
atgacgtataagacacatctggtcggcggcgcagtcgctgccatgctgctgactttggcagcatccgaacgggaacttggactcaagccgtttacaacgccagagttcttcggagtgttgaccgcctcactacttggcagtcttgcaccggatatcgaccaggggaaaaagagtaaagtcggcgcgatggtcaagcctgttgcttccgtttgcagtaagtgcttcgggcacagaaccttttgccatagcgtctggtttctgcttctgctgtactttatcatccgtggtatctttccttcaatggcgtttttcggtctcgcgttctgcatcggcggtgcatcgcatctgttgctggactgcttcaacccacgcggcgttcggcttttctggcccattccgctgactttccatttcggcaatgttaaaacggcgagcgggcgggggagtatgttggagaattggcaggagtatgtgtttcgtgtggcgctggcctgtatgtttgcggcgctggttctggtggacgcctatcggcgtgctgccccgtttggaggaatttga

SEQ ID NO: 2488 - DNA, 2646 bp, Unknown
  Unknown gut bacteria
atgctcgaaactatattttcctggctgctcagtgcggtcggagaaggattgcagttgtttgtcaatttcttcttcggcaatggaaacgatgggggtctcctgaactttaccctgggaaacctttatcagaattttccatatttcggcacagcctatgcaattctacaagcctgcggtctgggattggtccttgccattgcggctgtcaatttgttcaaagtattcctcggcagcctgtccaaagcgcaggatactcccacgcaaatccttgttcgagccgcactcgccacggttctcatttatctcggcggctatcttctttccgcagttgtgggcatcgcgaaagtcccatacgacatctttgttgggtctgacgctatcacccatcattttggcatacctgacagcctcttaacagacttgtccgctgccgtaggtgtcggagctgctgggctgcttgtctcactcgttctaatcattgcgattgcatggaaccttatcaagctgttgctggagtgtgttgagcgatacctgatggtcggcgttcttgtttatacatcgcctctcatttacccgttcctgtcctctgccgcgacggctactgtatttcaacgatgggtaggaatgttctgcggtgaatgcgccctgatgtcgctctccgtactctttaccaaactgtctatttccgcactcagttcaacgagcggaggaaactccgttattgcaaagctgattatgtgcctgaccatgtgcaaaatcgcacagcgggtggattcctatatgcagcaactcggcatcggtgttccgacgaccggagaaggcattcttggaaacgctatggcagtcggctacgcactcaagcacgcatttggcggtgcagctcagaaggcatccaaaggagacgctctttccggcaacaacagcacgttcggcaatctctttcgtgggaagcgagcgtacaatgacgcattcgctcaggggaatagtccggcggacagccgtgccgcgagaaaggcggccagggattacgcgaaaactcctgctggagactggggcatgaaccagttcaccccccgcaatgcaaacgctgtggcaacggcaaaacgctctcaggaaagtgccgccgcatggcaggagaaggtccagcggcagagcggacccgtcggagagaacggcggaggccgtacaggtcaacaggatttccaggacaatgccaagaagatgggtatgtctgcacagcagtttgcccgcatgaatttggagacaaacggtgcaggttgtgccttgattggacccgacggcgacaacaaagccaatttcgaactgtctccggaagccaaaaatgctggcctgatgacctcgttcccgtttggggatgacaaggacggaatgctggttggcccggacagcgctgtggccgcgcatattcaggataactttgataagaccgaattgactgattttgctccggacacggagttccatgacgtcaatcccgccagcctatctccggaaaatctggaaaatatgaaggcacagcaggaagactcgaccaatgcgtatcagagcacgcttgcgaatacgctcgcgcatggctcgcctgttgtcgcgcaggaagtcctcttcaacgacagaaagaatatttctggcaacgatacgcttgcgcaggcagcactctccaatactttcggagaaaatctccgcgtaggcgaccagtccggcacggcggcggccagtcgcctcagcaatatccgtgcagagacacagcccctatacactgatgaagcagggaatcagtggggcggcggccgagtggtcagcggtctctgcgccgttcccggcagttccggccgcacctatgaggacggaacggaagtcccgaagttcaagcgtctggaaatcatggacgagactgcctataagcagatgtcctctatccagcaggctcagatgcagcagattccctcgaagaacggggagattttctatgcgagagcaatggatgtggaccagactcagggcagcgtcgaagattggtctcgcgctgttcaggaaggcggcggacttcaggatatcgagaaccccagatttgagcagggcagacctgtcgcacagaatattgctgcaagtacgcggtatgagcctcgtacggacgattctctgccgaataccggcagaggaacagaaagttcccgtactcacgagactccttccagcggcggagagacgcgcacttatgagcgtcgttccgaagacgcaggtggtgccgcaggcggtgagcgtcatacttacgagactccctccggcggtggagaagcccactcttacgaaccttccgccagagaggcgggtgctgcttcgggcggaagcggcggtgaacctcggacggtcacacaaaacaccatcatcaatcagccccccagctatacgcctgcacagcgtatcgaggttatcaacgaccagtcgtccggtacgccggcttccggtacgccgcagacaccttcttctccggaatctgccccgcgcagcgaaggcaggcagcgggatgacggctcccgcaatggcggaggaggccccaagccggaggaacagggcaagggcaagaagcctcctcgcgtaggtcccttgcgcgataagcgaaagtaa

SEQ ID NO: 2489 - DNA, 405 bp, Unknown
  Unknown gut bacteria
atgcagaagacttgtctcaactgcactcatgtgggcgtgtgctccaagcggatgcagttcatcgtgaacaactatctcgtcaaaagacactacgacgagattgagaatgtcagcaaaacgctcgatatctccgtgaactgcgacagctatgcagaaaaggatttcttttcgttcatctgtgcgcgggttcgcgactattccgatggcgaagtctggagcgatggggaccagattctgtgcaagacagaatctgccgcgaacgcgctgtgcgacctcctgtggcagctttacaacgaacgaggggaggcctttgacctccacaccggctactacgaccccaaggaggacgaaagaaatcacgaagaagacagatacaccggctggtggtatgtgtctgccgactga

SEQ ID NO: 2490 - DNA, 318 bp, Unknown
  Unknown gut bacteria
atgaacaagaagtcttttcccggccacgatataccggaggctgccaatctgccagttgctcccctcacacctgatgacaacgagttctacgccctgtgcgggttcatcgacgatatctttttactgcctgagcgccgagaacgcatcgtgaaactcgcacaggacaaccacctacccatcttcatggttgtgaatatggttgaaccttactttgcgctcaaccatattacagagtatgaccactcgcctgattcgtttgagatggtgttcaagtatctaaagacactcgctgacgaggagggggagctgttcgaataa

SEQ ID NO: 2491 - DNA, 2037 bp, Unknown
  Unknown gut bacteria
ttgatttatttgaaaggaggggggcaaatcgtgaaattgtcggctatcggcatcaccccgcagaaggaaaagcagttcaacgggaaaggtattttctctgttgaggacatggtacgctaccttccgcgaaaatacaacgatttcagcagagagactggaatcttgccggaggaccaaatctcctgtcttattgtaacggtcaataaagtctgtacctacaacaacggaaagccgttgatgattgtgttttgcgaaacggaagacggaaagcgtatcttcgtcaaatggttccatcaaaactatctcgcggcaaagtacgaagagttcgttggacataaggtctatttgtgcgcaaaactcgaatatagcgcagaatatgacaattactcggcgacctcgccggaaatgtttgagcctcgtatcagcatcggaaagcgtattatcccagtttacagcaaaattcccggcatgagcatggactacttgtctgcaaaaatggaagcagcagtcagtatgccagaggcgctgggagagacgctgcctccggacatggttgcggacgagaagctgctgcttatgcgggaggctttgtactctgtccatttcccgcagagcatggcgcagatagaaaaggcccatgaccgtcttcttctggacgatatggtgtacttcgccatgagtaatgaatacgcggccagaagctccagtattggcagccccttcaatattaaaacgcttggcaccataaaggaaatcacggaaaacctgccatatcagctcacgaaggaccagaaggataccgtgaattccatgattcagaaggtacgggagggaaagcgcctgaatgcgctggtccagggcgatgtcggatgtggcaagaccatcgttgccatactgatgatggctgtgcttgcggagaatgggtatcaggcagtcctgatggctcccacgcaagtccttgccaaacagcactatgccgacctatgcgcaattctggagccggtaggcttccacatcgcgtatctcggttccaacatgaaagtgaaggagaagaaggctgttctggcgtccattgcgagcggtgaggcaaatatcatcgtcggtacgcattccgttatcggaaagagcgttgaatataagaaccttggtatcacggttacggacgaggaacacaaattcggtgttgcgcagcgggcggctctggtcgaaaaggcggcggcgggcgttcacagcatcaccatgagtgccacccccatcccccggacgctggcgcaggtcatttatggctccgcaatcgacctctacaccatccagacgatgccagcagggaggaagccggttgttaccggtatcgccacggacgaagaacgaatcatgcgatttgttctgagtcagaaaagaaaaggccaccaatgctatgtggtttcgccgatgattgactccagtgaagatatggccggagttctttccgtggaagaagttagcagggaatacgagaaatggctgaagccatacggtgtccgcattgccacgctgactggcagagacagcaaggaaacaacagaggaaacgattcagaaattcaaggatggagcgattgatgttcttattgcaacgacagtcattgaggtcggcgtcaatgttccgaatgctaccgcaatgattatcaccaacgccgagcggttcggcctttcctccctgcaccagcttcgcggacgtgtcggcagaagcagcctgcaatcctattgtgtgctgcaaagcaatgaccagtcggaaaaagcgatgcaacggcttggtgcaatggttcgaaccaccaacggctttgaaatcgcggaggaagacctgaaaatccgtggagcgggagactttcttggaaccaggcaaagcggcgaaaacaaatacatggcattgatgctggcatatccggataaatacaagtatgcgctaactcttgccaagcggattctggacgaccggaagaagtgtcccctcctcacgaaggtgctggccgaacaggaggacgaaagtggtgaataa

SEQ ID NO: 2492 - DNA, 783 bp, Unknown
  Unknown gut bacteria
atgagaggagaaaaaccgatgaaggttatctgcattgcaaatcagaagggcggcgtcgcaaagacagggaccaccgcaatcatggcttccgcgctgacaaagcgcgggaacaaagttcttgcggtcgatatggacccgcagggcaatctcagcaagcaggtcggtgcggaggataacggcaggggcgtctatagcgtcctcagaggggacatcgccattcaggatgctatccagcacttcgaccgctttgatatcttacccaccaatattctgctggccggtctggaaggggagctggtatctgagattggtcgtagcttccgcctgaaaaacgcactcaaggacagcgctgtgcgggacgtttatgactatgtactcattgacacgccgccttccctcggcatcctgacaaccaacgcgattgtggccgccgactacattctaattcccacggatgcggattccgacgccatcagcggtatcgcccagctcggcaacacgattcagcaggcaaggcagtattgcaacgtggacccgaaaatcctcggcatcctgttcaccaagttcgacccgcgccagaataacagcaaggacatgatgaaagttgcgatgcaggcagcaaatgcgctggacactaaggtgttcaacaccttcattcgctcggcagttatcgtaaaagagaccaagagccgtgaactggacttgctgacggctgcaccggacagcacggtggctatggattatatggcactggcagacgaaatcgcaaaggagggtatctga

SEQ ID NO: 2493 - DNA, 1122 bp, Unknown
  Unknown gut bacteria
atgaaaaaaatcacatcgcttttactttccttgtgtctggcattttccttgtcagtccccgcctttgcaagcgagaaaacgctccagaaagtgaatcagtacacgcccggacagttcaccgatgtccccgatacactctggtgcgcatctaacgtccagtccgtctatgagtatggccttatgaacggcgtatccgacagctatttcagcgtgaacggtgagttgaccgttatccagtccattgtcatggcctgccgcatccacgccaactattacggcaatgccatcgacaccaccgatgcaagcgtctggtatcagccctatgtggattacgcgaaagcacacaagctggtatgggaggcggacgatgcctacaacagccccgctcgcagagaaacatttgtgacgattttcagctatgccatgccggaggaggctctgaaggtcatcaacgatgtggaggatggggctattcccgatgttgccgtgagcgccgcatacgcgcagtctgtttaccgcttctatcgcgccggcatcctgaccggcaatgacgccaagggaacctttggcccgcagaccactattacccgtggcgctgctgcggctatcattagccgtatggcggacccctctctgcggaaatccttcacgctccaccagcagccctttgagccggttcctatcagtcagcttgccaactacaagagtctcaaaaagagtatgaccgattccgaatttcaggccgcctatgacgcggcgcgaaaaatcattgaacctcttgctaagaaggaccgtaccgagcagctgaagggcattgcgtcggcgctgcgtgacatggtggatagtggcaaggttgcatatacgacctcagagccgcactacaacgacccatacggcttcttcgtttccggtgtcgcctcgtgtgcgggctgtacgcgagcgactggtctgtgcctgaatatgttgggtattccctatgaacacgtcaatgagaaccagtacacgcatcagtggtgccgcgtggatatgggcggtggcgtgtattggatttgcgatgcttacggattgtactgcggtcctgaatccgcgccgtaccagcatcccaatttccccaatgcctaa

SEQ ID NO: 2494 - DNA, 1485 bp, Unknown
  Unknown gut bacteria
atgggctacgataaattcagcattgacatccgagaggttgtcaaactgcttggcttaaaggtgtctccgcaatcggattttaatgggacgtctttcaacgttcgttgtccgttttgcaatgacaccaaatatcacatgaatatcaataccgtgaagaatgcgtattcgtgtgtgaagtgctccggaggtgagaaggggcaaggagcgttggacctgtatgcccgcgttgcacatggcgttcgctgtgttaagggacagaacagcagggaaatgtaccgaaagctctgcgacgacctgcacatcgaagccccagttcgcagccgcgtacagaaagcacaactcccggaggtcgtggaaatccaccgcgccagcgacgaggtggtggataaggcgtatcggaagctcttggacatcaagttctttcagctttctgacctgcaccgtgagaatctgcacaggcgcggcttttccgatgaagcgattgagcgaaacgggtatcgaagcatttcggccgattttccgtgggtcaaccgttactggaaagcgaaggagcagtatcagaagctgattccgtctattcgcaaggacaatatcctcaagcgccgtaccccagaacggcttatcgcaggtctcattgcggcctccatccttgccaaatgcggatgcgagctgcgaggcgtacccggttttttccggatagacggcgtgtggtgcttcaaccttgagccggggatgctgattccaacgcgaaatgcggtaggtcaaatcgttgccctgcaagtacggcgggataaaccgtccgactggaacgattactgcaagcgtaccggccagaacaaggagtttcttcggtacatgaccatctccgcgaaaggcctgccagacggcgttaccacggatatcagtcaggcgcatttcccacttgggaacgatagcctggatgacccggaaaccgctgtctgcattacggaaggccctctcaaggcggatgcagcagttgaattgaagggcaatcgaaagatgtttttcattgcgctgcacggaacgtccaataccaaaaccttgccagcaattttcgcatggctgaaaggcaaaggtgttgaaacggtattcaatgtatttgacatggataaggtcacaaatgtcaatgtcgcaaaggcgggaaagcgtgttcgagctatcgccgcaggatacggcatcaaactcgcagagaaatgctgggatgcggaatatgcacagcggaaactcagcgaactgaatgccatctgttgtgagcatggcattttcgttccgaccaccttcaacgtgttcacagacctcgcaaatgtttctcaggagcttgcaaagcgaaatatccggcacagccgcgtcaaaaacgcagatgggctggaagagaaacactactggtctgataagaccaagggaattgacgactatctgttgtctatcaggaccgccacaggcggcgaaggggcctctgcttaa

SEQ ID NO: 2495 - DNA, 1488 bp, Unknown
  Unknown gut bacteria
atgcagagaattttaggattgctcaatcagagcaacagtctggaacatatcgtgcgactgtccaatattgagacagaagatgacctcaatcggtgcatcgcagaccaatatgcggtcgcttttacaaaagcacagtgggtggaacgcttcccgaagattcctccggaaaatgtcgtctgcgcacagggaacactgaatgtgaatggcttaatgtactacgaccctaaacacggcatctgcttcccccttcatctgtttgggaactcccttctgttcgacaaaacggacgatgattttcagcggcggacgtgcagcatgatttcggagttggagcagtgtcatgctgaccgggattaccggcgcttgcttcagccggttgtcagcgaaggtacgggtaaaatcgtcatgcagctgctcctcgaccttctgaatgcagacgaaccaaactcaaagctgtatacaactatcattcacgagtattccttctgtgatggcggggcgggcgttttcgcaaaagcccctgatgttgcagaaaagatgatgcgctgtaagagccgccagcagaaagcaagcacacggaagaagctgaagggatttcctgatgtgattcctgtttatcgtggagaaggcagtgaaagcactccatataccaaggctttttcgtggacaaccgaaatcaatactgcctatttttttgcatcccgccttggtggagaacgttcccgcgttgtgaatggattcgtgaagaaggaagatgttctggagtatcttgctgaccgcaacgaatcggaaatcattgtgtttcctgacaaggtgcaggatattacagtttgcgattgctatacgctggacgaatttgcctccaacattaaaaagccgatggacgggtatcggaatacgggcatcagccgtgttaccgcagcagacctgttctccgaggtccactcagcgtattgcgacctaccggacagctgtgaccatgataatacccatgcgctgcgtgtggcgcttatggctatgttcctctaccgtgtgcgcgtgctttcccgctataccggcaaggatacgcctttgggccgcagaaaaaatgtagctgagatttgcaagtcccttctgttcgcggcggcgtggcatgacacaggacgtaccagcgattttgaatcccctgaccacggagccagaagtgccgggttgttcgagaatagctatggtttagatgatgtggcgcgattccttatgacatatcattgccgttcagacgaggaggcaaaagcatatctgcatgaacacgctgaccctgccctccgtaatgacatttgggaggcgtacatggtgctcaaggatgccgacgcgctggaccgctggcggtttggcacactcagttccgactttatcaatgtaagtatgctgcattttgaggagtccaaacgcctgatgccggtggccgccgtgctgcaaacggtgaaattaacgtcaaagacggcgtga

SEQ ID NO: 2496 - DNA, 1173 bp, Unknown
  Unknown gut bacteria
ttgacaagtaagctattgtgtggtataattgctgcattcagtgaagggggggtggttgacatcacgaataccagtaatttagccgctgaccgtgcgcttgcctatgaagccattgaaaggcagcctgaaacagaagaaatcgcagcttcgaatgaacaggagaccgaagcgaagcagccgggaaatatcggcgaccatgtggcgatgtatctcagccaaattggcagcattcccattatgccgcaggtggaagcgaatcgctgcattgaaaaagtgcagaaggggaatgccgctgccgaacagctcgaaacgctgcgggtaattgccgaggagagcgggaatgcagttgaccccgaaatcaagaaagacctgatgaaggccatagaagcaggaagacgggcgaaagataaggttgttgagggcaatcttcggcttgttgtgtccatcgcaaagaaatatataaactcagccgattctatggtgttcatggacctcattcaggagggcaacattggcctcatgcgttccatcgactcttttgacatttcgaggaatgtgaagttttccacctacgcaaccttctggataaggcaaaacatcacaagagcgcttgccacgacggacccagccattcgcaagcccatctatgttgcggagggcaggcggagcgtcaataatgcaaaagaacaaatgcaacaaaaaggcttaccttgtgatgaccctttagaaatcgcaaaatacatggagggggatgcgtgggattccctttcaaaaagggagcagcagaaaaaactgcgcatcatccaacactcgctccagtaccggaagccggactcgttggatgcgcccgtcaattcggacgccgcaagcgattccaacacaccgctttcggaattcatcccaagccataacgagtgggataacccggaaatttcaacgtcagggaaggcactatgggaaacgatggacaaaatcctgcacgatatgcccgcacgagacgcctgtgtgcttcgcttacgattcggattggaggatggttgtgcttataccctcaaagaaatcggggacgaaatggacttaacgcgagagcgtgtccgtcaggttacagataacacactcgataagctacgcaacggaaaggcagggaagatgcttcaggactttcttgaataa

SEQ ID NO: 2497 - DNA, 1431 bp, Unknown
  Unknown gut bacteria
atgtttggtttagacaatctgtttgctcagacatccgcacagaaattctacattagcagagaccgaatcgcggaaatcctgcgcgtcagtcctgatgcactggatgccttcgagaaggcttattccaaagctgcgttgcagactgagccagaaagcattttcgaggtcaattccaggcaggcagcggcgaaaaacgagcggctcggcgacgacagcccggaagagctgaaagctcttacggaacgcatcgtgaaggagcttatctggcagacgctgacctacacttatgatgggaaaacaggcaaaattgaaaaatcgctttccaacgcaccggagaaaaatgctcctgtcaccaatcaggacctgctgcgaattcccgcttcgctgcgaccgcagctgagtggggaactgatgaagcgagaccttgacatcaccgcctcagctgcgctcctgttctactacgacaagatgcagaacgggaagacgccgaaggaccgtcgggatgcgtataaccgctttcggcagggactggacatccttgaccttgatgcgctggcctaccgcatcatcgggcagaatcgcaactccatcggacattggttcccggagcttgtgcgtgcctaccgggattctggattcttccggattccggcaacgacgatagccaaggtccccctgacgctcttacagctgactcgtctggactatcacagcctaacgccttcgaccatccaaatcgtcgataactgggcgcacgctgtatttcgcctgaatgacgagcgggattacttcgtgaaaaccggcacctattcatcgaagttcgacttccggaattgcctggtacacggagaaaaagaggttcgagagcttggcgagtatttgctctacatccaccatcaggcgttacagatggccggtccccttagctttccctgcatttatggggtctcaacgacaaatgagtgggtcgtgcgggaatttattccagataaagagggaaatccctgtatctatcatggtttgcctcttcatacggaatatcgcgtatttgttgactgtgacagcgatgctgtcatcggtgtctctccctattgggagccgaagactatgctcaatcgctttggttcatgctcggatgcaaacagtccgcatcagatgcacgattatgtgattttcaaaagtcacgaagcgaccttgatgcggcgctaccatgagaatgtcgattccgtggtggaacacattcgggaattcctgccggcgcttgacctgcaaggccagtggagcatcgacgtgatgcagaatggtgatgatttctggattatcgacatggctgtggcggaaaattcggcgttctatgattgcgtgccggagagcctccgcaggccatctgctgaaaactggatacccgatattctgaagcccaacaactga

SEQ ID NO: 2498 - DNA, 1464 bp, Unknown
  Unknown gut bacteria
atggacaaaaaaattaaggaaagcaaaagaggactgacgttcagttttacgcctacagagaccatgcaaattggaagccggtacgactacatcatcagcaactccggcatctgcatcgtcccgtctaaaacgggtcgctataccgtgtcgcggaagaggtctggctccggctggaacccgcttatcgacctgcgaaacagggaagtgctcgatgcgattgccggcatggaaaatatccgtctgcatatcacggcgggcagtatccttgtttcgggtgaagcggagcacgcggttgtcctgcaatttccacgaacgcttctggctcatgccagaaaggtcgtgggcatcagcgacagctgcgcggtgtcccgtattctggaaggcacacaaatcacgctggacgaataccttgcatccagcaaagcaccgctggacatcgctgcaattcagaaggatttgccagatatatattctgtggtgtctctgttctcaggtgctggcatcctcgactggccgtttttcaaggacgagcggtttagcatccaatatgccattgactacgatgccggtgcctgccagacctaccggcaaaacatcggtatgcacatcgtacacggagatgttcataaagcgttcacggcagaaggctttccactggacaatgcggtaaaggctcccgatgttattgtcggcggtccatcctgcaaaccattcagcaatgccaaccgacatacacggctggaagaccaccctgacagcgaccttctgatgcagtatatgcgcatcgttgaaacgctcaatccgaaagtctttgctatcgaaaacgtaccggaagtccttaccgcctgcggtggttcctactatgccgcagtccgggaaaaagcggagagtttcggctacgagcttgattccggcatcgtgcaggattgcaaggtcggaggctatacgacgcgaaaacgtgccgttatcctcggaagccgcatcggtacgccaaagctggcacacattgcgctggcaggggaataccggacggcaggagatgctatcagtaaagtggacaaatcctggagcaattacagtgatgtaaccaagccaagctcggaggtggagaagcgcatgagctttgtgccacagggcggcaactatacctctatcccagaagaataccgtacggaaagcaaaaaccgccattcctgtacctaccggcgtatggcatggaacgagccttctccgaccattgtgaattggcggaaacctccgctcattcatccgttggagaaccgaacgctgacagtagcggaggcgaaggctctgcaagggctgccgaaggatttccgcatctgcggaacgctcggacagatgcagcagcaggtaggaaacagcgtgcctgtagcaatcggtgagtttataaagcgctgtattttgcgtatccttcaggcgcagagacaggtacagtttgcatga

SEQ ID NO: 2499 - DNA, 858 bp, Unknown
  Unknown gut bacteria
ttgcgtttgaatttgttcggaatttatttacttgagatggcacagggcttttacgtcggggtggctgtggtgtgttttcttccactcatagtcacagtgccctacgactttctgttccgccgtgagagaatcagggcgaattggcaggatatgaagaacgtcttcggatggctcctggcagggaaaaccccacaggtccaaaagaaaaaggaaccgccttcctggaatgtctggtttacaagaaactacatgataaagacaggaccggacgtattcagaccgtttgacccaaaattggatttgtccgcattggatggagccggactgcgactgacaaacatcttcctgtcggcgctggtggtgtcgcatcttccgtacgctgtcatcgtaacgatgcagcagcatggatggatgacgcccggtctggaggaaattttgcatgagctttttccggtcagcgttctcggaggagacccacggctacgcggagtccatgcgacactgctcatggtcgaaatgaccttgcttctcattaccgacatcattgaaaagagaagggatgcgagacgctacggcgtctcacggatgctgtccagtatgcggttgttctttcgggagcgcatgagtgaaaaagacgcggatgacgcctccttcttcgttgccatgctggcagaccggctgggagaggagcagaaggcagatatcgttgagcagacctcctacatcaggaaggcatcacccgaagtcggccaggagttcattgagacgctatgcggcctttacaatagctccgcagaatccggaagtttaacagaagccggagaatctatgatggggaaaatcaaaaatttagtctaa

SEQ ID NO: 2500 - DNA, 309 bp, Unknown
  Unknown gut bacteria
atgaagggagggcttattttgattgataagtataagctgatgcagaaagtatatggaaaggatatcgtttatgtctgcggcacctgctgcaaccggcaaacaaatccggacgatacgaaacacaaaatttgtattgctttcggaacgtcaccgatggtagactgtacctggggtgaggataagcgtgcgtgtgggctttataaccgcccgtttcgcggtctgcgcccggttcgggtccctctggtcgaaatatatgggccgaaggaaacaacggaggaaaacgtaccgcaggaatcactttttaattag

SEQ ID NO: 2501 - DNA, 1290 bp, Unknown
  Unknown gut bacteria
atggcagttaagaaagatttatcaataaaatacttaggcgttgactgtatcaatccgttcttcttatcatcatcacctgtaggcggcaactacgatatggttgcaaagtgctatgagacaggctggggcggatgtttcttcaagacagtgggaattttcgtggcagacgaatgctcaccgagatttgaccagacaaacaaggaaggattaccatgggtaggcttcaagaacatggagcagatatcagataaaccgacagagaagaacttcgagttcatgtacagattaaacagagattatccagaccacatcacagtagcgtcaataatgggctcaagcgtagaggaatggaaagagcttgcgaagatggcagaacaggctggagcaaagcttatcgaaggaaacttctcatgcccgcagatgacatcacacgacatgggatcagacgtaggaacaaacaatgagctggtagaaagctattcaagagcagtatcagagacaacaaagataccgttcatcgcaaagatgacaccaaactgcaagaacatggaagagcatgcggcagcagcgcttagaggcggagcagcggcagtatcagcaatcaacacaatcaagtcaataacaaacatctcatttgagaacaatacagcaatgcctgtagtagacggcaaatcatcaatatccggatactcaggagcagcagtaaagccgatcgcgctgagattctgcacacaggtacagcagagtgcagacgttcacaagcttgcagcagcaaacggacacgactacggtcatggacacgaaatgtcaggtataggcggaatcgaaacatggagagatgcggctgaattccttgcagtaggatgcagaaacgtacaggtaacaacagcaatcatgcagtacggctacagaatagtagaggatatgataaacggaatgggacacttcatggaagaaagaggctacaacaagcttgatgacttcatcggatgtgcgcttccaaacataatcccagcagaagatcttaacagagattacaagctgcttccaaacttcgactatgacaagtgcgtaggctgcggcagatgctatgtatcatgctacgatgcagcgcaccaggcaatagactggaacgaagagaagagaagaccagagcttaatgacaactgtgtaggctgtcacttatgcctgaatgtatgtcctgtacaggaatgtatcacaccgggcgaaatcaagtggaaagaaggcagaacacagacagaaatcagcttcagaaagagatacgaatag

SEQ ID NO: 2502 - DNA, 1755 bp, Unknown
  Unknown gut bacteria
gcggcagtattcggcacagagcttgaataccctgaaacagagtgcgaccacgaggagggaaatgcagcggattatatcgcagttgatattcagtcagacctttgcagaagatatacggcaagaatagttaaagacgtagtaataaagcagtcgccttggtggatacagaaacgactcatcagagcgggcatgagacctatcaataacatcgttgacattacaaacttcgtaatgcttgaatacggtcagcctatacatgcatttgatatcaacactcttgcaggaggcaaggttgtaatcagaacagcaaacgagggagataaattcactacccttgatgaaacagagagaactctttcagagggcatgctgatgatatgtgatgccgaaaaacctgcagcaatagcaggcgttatgggcggacttgattcagacatcagggacaatacgacaacaatcgtggttgaatccgcaaactttgcaggtgacagtgtcagaacaacctcaaagaagctgggacttcgtacagaagcatcggcaagatttgaaaagggcatagaccctaacctgtgcgctaaggctgctgacagagtggtaaaactcatagagcttacaggagcaggcacacctgttgcaggaagcgttgacgtttatccgcaggaaatcaaggcagagcctgttcacgcaagagtttcaagaataaacaaagtgctgggtgttgaacttacaagagaatttatggtaaacgctcttgagagtctggaaatgacagttacaggcgagggcgatgatatgtacgttacggctcctacagtaagacaggatatccacattgaagaggatatcgttgaggaagtaggcagaatgtacggctttgacaagcttcctgttacaattcctagaggcaacagcgaggcagtaaagcctgacgacagaattttaagagatttggcgagagacactatggttgcaatgggcgcaacagaaatccagacatactcgtttgtaagccctaagggcgttgacaactgcagaattgacgaggattcatgggaaagatgcttcgtaagaattatcaatccgctgggagaggaaaactcggtaatgagaactatccttactcctaatatgctggaggttctctcaagaaactacacaagaaacatagaagccgtaaaggcatttgaaataggcaacacatttatggcagacctgtttgacgagaaagctcttcctgaagagagctactcgatgtgcgttggtatgtacggcaaagacgccgacttctacgcgctcaagggcatgatagtagagttgctttcgataatgggcatcagagatgttgaatttgtcgcagaatcagaatacggagtataccatccgggcagatgcgcaagaataattgcaagaattcctaaaaaggcaatgcctgaggttgacgatctcaaaaaacttatcctgacaggagaggttgaaggcacagaggaatacaacaagctcaaggatataatcgagaacagcgatcctgttgcaatgggagattatgaagaggttgagcttggtattatgggtgaggttcaccctgaggttacggcaaaatatcagataaagacaagatgctatgtatgcgagctgctgtttgatacagtatgtgaaatttcagatacagacaaggcatataaacagcttcctaaatatccgtcaacctcaagagatatcgcgcttcttgtagacgaaaatatggaagttggaacc

SEQ ID NO: 2503 - DNA, 876 bp, Unknown
  Unknown gut bacteria
atggttaaggcaggagtattccttatcttaaagcttgctccgtgtcttggctggggaaatgcagaatacggtatggttaactatgccggaattatggtaatggcagtaggaggcatcacattcctgcttgcatcctttgcggcaatttcacagtccaacgcaaagagagttctcgcttactcaactatagcgaacctgggacttatagttgtatgcggaggcataggcacagctgctgctgtatgggcaggcattatgcttataatattccacgctgttactaaatcacttctgttcctgtgcgttggtacagcagaacacaacatcggatcaagaaacatcgaggatatggacggactgttcgacagaatgcctagacttgcagcatgcatgatgataggtatctcagctatgttccttgctcctttaggtatgcttgtttcaaaatgggcagcactcgatgccttcatcgaaacaggaaacgtatttatgagcgtattccttgtagcagtattatgcttcggaagtgccacaacagtattctactgggttaaatggctcggcaagctctctgcagttgttgcaggtactgagaacatagagggcgcagtacataaatcagaaaaattcgtacatacgcttctggttatccttgtactcgttacatgcctcggcttccctgtaatttcatcagcagtggtagttccttatctcggagctgatatggcggcgttatcctcaggcaatatgatgattatgtgcattatgcttgcggttataatccttataacaatactgttcttcggaaacacaaagaaaaaaatcgttcctatataccttgcaggtgttaaccagggagacaatctgacattcaga

SEQ ID NO: 2504 - DNA, 840 bp, Unknown
  Unknown gut bacteria
atgaccaaattattgaagaaatacattaataaaggaattagagaggacgagacaatgagtacagcaaaagatataaaagtatatattgcagagcagtttgaaacaaccagaagaaaagaattcagctttactgatgatatggtatttcatattatatatggtcagggtacggaggagtcaaaaaaagcgctgatagcattactgaatactgtaacaggagaggaaatgcctgttaaggatatcaggattcttaatcccattgattatcgtaaaagagaagatggtaagcaggtagaatttgatatcagacttgaaacagattcaggcgatctgtttgatgtggagatggagaaacagcctgaccggtacttccggaacagatgtgtgctgtacataacaaaattatgcgataaatcgttggataaaggtgaattgtatgataaaatgaaaagagtaacaatggtgtcatttgcaggagagaattttctgggagatacagaatcataccatacagaattcagcataagagatgagactgggagaagcgaactttccgacagaatgagatttcatgtcatagagatagacaaggtggacaaatccaaggctgtctccgaaatgacagcgcttgagagagtggcactgtatttcagatatgcaaacgacccgggcagtgaggacttaatatcacagcttatagatagcggagaggaggcaatcattttggcagagaatatgttcagagaactgacggcagatgagatagcctatgagaaaatgctggcaagacagaagtttttatggagatacggttcaggtctttcagcggcaagagaacag

SEQ ID NO: 2505 - DNA, 807 bp, Unknown
  Unknown gut bacteria
tacgagtttgtgaccgaaaaaagaattgactttacagacgatgaaaaacaggagctgatgaaaaaggaatgtacggcgataacctcggagtatcagactgcaaactattttcttatgagatgcttcggtcacgattatgaggctgcaaggtttcttgcagaggacaacgtagatgttacattgtatgacgactgcaaggcggcggcgctttaccgcaatgtcatagatgagatttcggagggcagatatatgtgcgaaagccttatcgactccggcgagagatacacgctgctggtttcagaggttcacgttgagaatttcagggttactcattttgagaaatgctcaggctttaaggtcagctcggcagaggcggcaatgatgcttgcaagacctgaatttgtgacagtgtatgatatacttacaagccctgaaatattcgatatgggcatgatggagctttccctgaactcaatggttacatctcacgaaaacggcaggttctatatgattttcaacaagaacaatgagcatgtcaacaagagagtgttcaaaatgagtgaggatgtgtacggtatatattatgttacggcattcggtcagctcatagctgcggcatacagtatcgaaaacattcacagcctcgaaagagacttgaggagaagtgacctgagcaaatatcttgcgctggtttcaaaatatgagttcaaagagccgatactgtatgattttgtgcagagtgattttgaggattttgaggattttcttgactatatacaggacttttttaacgaggacgatgactga

SEQ ID NO: 2506 - DNA, 1203 bp, Unknown
  Unknown gut bacteria
atggcaggcaggagggaccttaggggagagaatataattactatagatggggcggactccaaggactttgatgatgccgtatcggttaaaaggcttgacaacggcaatttcctcctgggagttcacattgcagatgtaagccactatataggcgaggactcgccgcttgacaaagaagccctcaaaagaggcaacagcgtatatataatcaatcaggttgtccctatgcttccaaaggagctttcaaacggcatatgcagtctgaatgagggcgaggacagacttacgctgtctgttgatatggagataactccggagggagatattacagagcacaatatatatgagagtgtaatccggtcaaagcaccgcatggtatatactgacgtgtcggatataattgagaatgacgacagagagcttgccgcaaagtacagcgatatctatgatatgcttatggatatgaaagagcttgcgcagatactgcgaagcaaaagagaagccgcaggcagtcttgattttgatcttgacgaggcgtatataactcttgatgaaaagggagttcccgtaagcgttaacctgtgcgaaaggcgtacggcaaacaggatgatagaggaatttatgcttgccgcaaacaagactgtggcagagcagtttttctggcttgagttgccgtttgtctacagagttcacgagaagcctgacgcagagaaaatgcaggaattcaggacatttctgatggggctttcaatcagactcaaaggagagggcggcaacatacatcccaaggctttaaatgaggttttagagcaggttgcaggcacaagctacgagaatgttgtaaatacagtaatgcttcgctctatgaaaaaagcgttttattcaaccgagtgcgaggggcatttcggactgtcgatgaaatattactgtcatttcacttcgccgataagacgttatcccgaccttataattcacaggataatcaaagaatatctgcacggcggaattgacgatgagcggatagcggttctttccaaaaaaacgcaggaggccgccgaaacctcatctgttacggagcgtgcggcgatagagcttgaaagagacgttgaaaaaatgaaaaaggcccagtatatgtcctaccacataggcgaaagcttcgagggcgtcataagcgggattacaggctacggaatgtatgtggag

SEQ ID NO: 2507 - DNA, 1548 bp, Unknown
  Unknown gut bacteria
actgcttcggaaacttccgcaaacagtaaaactgccggcagaagaggtaaaaagaaatcctccggcaaaaaaccgtcacgggcaaaacgtataatcagaatactgcttcttgcaatccttgcggcagtactggttgcagccgtatacgctgcggttgtcatagccaaggcaccgaagatagatcccgacaacatatattctttcttaaacgaaagctctatcctgtatgatgatgatggaaatcagctatacagcatatattcgggagatgacggcaacagaacaaatgttgaatatacccagattcctgaaaatatgataaatgccattgtttccattgaggacaagactttctggaagcatcacggctttaacttcataagaatactcggcgctatcaaggacagcatattcagcagcgagcagataagcggcacaagtacgcttactcagcagcttgcaaggaatatataccttgacaacgaaagaacctacgcgcgaaaaatcaaagaggcatactatacgatatgtcttgaaaacaagctctccaaggagcagattatcgaagcgtatcttaatacaatcaatctcggctacggcacatacggcatacagtccgcggccaacgcatatttctccaaggacgttgaagacctcgacctgcttgaatgtgcagcgcttgcagcactgccgcagtcccctaccaccaacgctctggtgctcagagttgaaaagggttctgtaaattccgatgacaagaacatattggagcaggacaacgactggatttactactacaacggcaaggcctccaaagaaagaagagatacagtccttgaatttatgtgcgagcagggatatatcacatcagaagaaaaagataaagctctttccgcaagtctcaaaaaacatatgaagctgagcaattcttcatcaagttcattcgcctcatatttcacagactacgttatagatgaggtcgtggcagatcttcaggaaaacaacggaatgagtgaacagcaggcaagagattatgtctacaacggaggacttgagatttatacaaccttaagttcagatgcacaggaaattgtagagaaagaatacgcagacacaagcaacttcccgggcaccgcaaatctcagaactgacggaaacggcaatattctcggtacaggcggcgcaatactgctttacaactacagcagctattttaacagcgacggtgatttcaccctctatccgtcagaattcaaatggagaaaagacggatcacttctgattaagaaaaacaaacgtcttgcattctataagacggaagtcgatggcaagacagactacaatattgaattcaagaatatgtacacaagggaaaacggcttcttctattcaatagagggcggcgtgatttccattgatgccaagtacaaatcacttagcaaaaaaggcaatatgattataagtgcggatttcttcaagcaaaagaaagcttctgatttcttcatcaaatcaggctcaaatctggttataaaatcttcaaactataca

SEQ ID NO: 2508 - DNA, 1239 bp, Unknown
  Unknown gut bacteria
gatatgctggcagaaaaagcaggaatagatccatttgaattcagatacaacaatatagctcgtcctggagatactaaccttaaccagtatccgttcttacattatccaatggaagaaatgatggataagatgaagccttactatgacaaggctgttgcaaaggctaaggctgaatcaacagacgaaatcaagaagggcgtaggtatcgcatggggcggatacaacgtaggcctcggcgcagttgacgaagctcacgttgcacttgaattaatgcctggcgacagacctaaattcagaaaatacgacacctggcaggatcagggccagggcggtgaccagggttcattaatctgtactcttgaagcactgaagccttacttccctgacgttactcctgatgacatcaagcttatccaggacgactccaagtactgccctaacacaggcgaatccgcaggttcaagatcacactatgcaaacggtaaagcaagtatcgttgcagctaagaacattgcagatgcaatgagaaaacctgacggaacttacagaacttacgacgaaatgattgcagaaggacttcctacaagatatgacggagactgggcaacagttgacgaatacgattacttctacgatcttgaccctaacaacggatcaggtaaccctacttatacatacacttacgctctgtaccttgcagaggttgatgtagaaacagctacaggtaagacagaatgtacaggtatgacatgcgtttactggatcggtaagccaggaaacattcaggctgttgaaggacagatcttcggcggaatgtcacactcaatcggtttcgctctcagcgaaaactacgaagatctcaagaagcacaacaacatgttcggcgcaggcgttccttacatcaaggatattcctgacaacttcgttgctatcgacgttggcggacacgaccctagaggacctttcggttcatcgggagcttcagaagcattccagtcatcagaccatatggcagtaatcaacgctatcaacaatgcagttggcgtaagaatttacgaaattcctgctacaccagctaaggttaaagccggtattgatgcacttgcaaagggcgaacctaaccctaacaagcctgaaccttacttcttaggctcagaccttcacgatgcacttgacgatatcagaaacaaccctctggatccgtcaaagcctgcagaacttgaattcaattcattaggc

SEQ ID NO: 2509 - DNA, 1224 bp, Unknown
  Unknown gut bacteria
acaatcgtattactcgtattaattcctgttttatgggcggcgcctatcggtgtttatacagcagagcttggagcaatagctcctgtagatgcaggcccgtatgtatggatgaagatggcctacggagaaatgtggggcttctgcatgaactggtggctgatgctggcaatctatctgggacaggcatcatatgtagtacttgcagtaggctatattgacaaatttataccgcttacacctgtggcatcacttattattaaggtaggcatagtagtagttttaacagcagtaaaccttataggactgaaagaagtaagcatcatcagcactattttcacaatcataattttagttgcttttggtcttgtaactgttgtaggctttgcaaactggaactataaccctatgacaccgtttacacctgaaggacagagcttcgttggaagtcttggcacaggactttgcataggcatctggatgttctgcggatatattcagatatccaatctgggcggtgaaatcgcaaaccctgaagtaattcctaaaggaatgaaaatctcaattgtaatgattacattaagctacgtgcttcctacaattgcaggaattgcatcaataggcaactggagtgaatggggttcagacgttggcggctcaacattaaactattcatcggttctgactcagaacatcggaagcggctttggcatagcatttatgattgttgcaatcatagctcagtgcgcaattgtaaactcagtaattgccagcggttcaagactgtttatggtacttgcggaagacaacctctgccctaacttcctgacaaagctgactaaaaagagcaagatgccttactggcctatactgatactggcagcagttactatcatatttgtaaactttgacttctcaatgatagtatcaataatctcacctgtactgtttgtactttatgtaggccttggatttgcattcctgaagatgagaaaaaaatatcctgtaaaggacagaacagtatggtatgcaaaaggcggcaaggcagtagagatttatgtaatcgtaagcttattcgttgtaggcttcatcggaatgatggtaaacggtacagaattcttcctgctgggattcctggtaattctgtcgggtatagttttctatgtaatattcaaactgctgtacggcggactttacaaggacgatccggagaactatcctatcaac

SEQ ID NO: 2510 - DNA, 1227 bp, Unknown
  Unknown gut bacteria
attattggcatttactatttcgcgggggatattatgaaagaacacaacaacaaaatcgacatagcaaaagacctgacttttcatatttcagatgttgcatttgcaagatttaaaagcttctgcagcgatgtactcggagcaagtgtcgatgaagtaccatctcaggaaagcatctttatgaggcagaattttgccatagtcttttttgcaacaattttattcttgctgaccaacggtttttaccttgtcaaaaacatagcattaaatactatgctggctcttgatatggtgcctctctatatgatgacggcagcttctcttgccatgcttattttcgtaagagtcaacaaaaaatatgactcacccctgtcaagatttgccctgctggcattttatacggttgtcattgcaagcgttaccgtttttatggtttcctgcaattttcacaaaatcggtctttcgatttcgatgtgctatctgtttgtaattatgattgcgccgacctacaggcgttcagacactgtattcatatgtattctgatactgataagctggtggcttcccggacagcttccgtatgcggacaactatgatatgttcaagcattttcttctgcgattttcaattcttgtaggatttatcgccatccgctccatcttcctgcggcagtctgccaacgaaagatatgtcaaggaaatgaacaattcttttctcaagcttgcatataacgatataatgacaggtacgctgaacaagaaagcaatggaagcctaccgcacatttattgcagagagaatgtcgcctgaaaaggtcagcgtgataatctacgacatcgataatttcaaatcatacaacgaccattattctcatttgaaaggtgataaggctcttaaagctgtttccgaaagcgttgtcagggtactcgaaaagtccgacagatatttgttccgcttcggaggcgaagaatttgtcgttatcctgcctgatacaggtgaagaggaggctcgcctgattgcatctgagcttcttgaagctgtacgtgccgccgccgttccgagaaatgacctgccgaatcataacattgttacagcctcctttggagttgcctgcggagcagcggaagaactcaactttctttcgattatggcaaaggcggacaagcagctttatctctgtaaaagcagcggcaaaaactgcgttgcggcaagcggcgtaatatacagatag

SEQ ID NO: 2511 - DNA, 1857 bp, Unknown
  Unknown gut bacteria
atgacaaagagcagtcagaatgacatctgcgaaattttcaagttcggaactatcaaggctgtaaacagagtccttgactccagcatacccggaactcatatacaccttcatcaggtaggcaccagcaacaaatgggctcttcaatggaatgaagaatacagagcctacaaaatactggcgatgacagaaggggaaaaatacgtgcagcttgcctgggatattgagggcgaaagcggcaaagacaaggctatgctaaatgtatggactgatgatgattttgataagaactacaacaccagccagctgtggcgtttcttcaggcaaagtgacggaagctacaaaatacagaatgcccgcacaggtaaattcgtaggactctatgcaggcgcggaatcactctggcaggacagcaacggtactaaatttgaaatagatgtttttgcaaacaaaaatgacagaatttcatatgcctactcacaggactggatggcagacctgcctgacaatgcgcttctttcatcagtaaatctgccgggaagccacgataccggcacagcatcagtcgttgaggactttgtggcacagttctctatcacttcatgccagaaatattactatgaggagcagttaaatataggtgtaagaagctttgatatacgctgtaatgcgcaaaaagacaaggctgcccctgaagatgtgagaattgtacatggtgacaaaaaatgggcctgcagtgacagaaacggcaacccgctcacacttaaaaacatactcgatgaaagtgtacgcttccttaacgagcatcctacagaatcaatagttatgatggtaaagcccgacgacggaagtactgaggggctggcaagagcagtaggcagctttatcaagaaagaggttgcaaaaggaaacagttgccgtgtatggaccggcaacgatataccgtcaatcaaagaagcccgcggcaaaatagttttcatacgcagatacgatattgatactaataaatacaatccggctgatgacaatcttgacgagcgctggtttggtatcaacctgtcaaactgggacgactattcctacggcgactataaatatgctattaaaatctacggcaaagacaaattcggtacatctgtatatgcacaggatgcatataacgagtattcaacaaccaagctgaaatatatagagggaacatttgcgcagaccacaggcgctgacaaatcccaccctataccttctgatgcgtggatattcaactacaccagctgtgctgtaggacgtcctctggagcttacaagcataatcaatcctatactgtttgaagacaaattcggcagcgatggcaagggctatatcgacaacagaagactcggtatggtaatgctcaatttccttgacagacctatgagcagactcatatacgaaacaaacttcaaaaacagcaatttcatggttgcaaaagcagatgcgccgacaactgtaagccttgttcgcggacagaagctttcacaggccaagctggcaggacacagcagagagggaaaatgggtattcgcagacggcaactatgttccgactgtcaaagacttcaaaaccggcaagactttcaagctgagatttataccgtcagacagtcgtctgcagggctttgaaagagaagttacaataacagacttcaagtacgcaggcaagactgacaataatattaaaaacgacagcagcaaaacagatacagacaaaaccaaagctgctaaggctgatgctccaaagacatcagacgatatacacagaactgtcgttatactctcattactggtagctatatctgcaattggacttggtatttcggcatta

SEQ ID NO: 2512 - DNA, 1929 bp, Unknown
  Unknown gut bacteria
aagacacctgccgtgagctggtatctcagagagaagtcgctggcagaggatgcggatgtaatccgaatcagcatttattcggacaacagacagattttctggaaaagcactcaaaaggcctttgccatcgcaggttttccgcttctttcagaatatgaatttccggcggagctgtctgattcggtcatgctggcagaggacatatgcagtatgtttgatacagacagagcctgctatatttttattgatgattttcatcttttggggagtcagggtgttgtatcgtttttgtgtatgattgcaaagaaactgcccgaaaatgtacatataattatagcaggcagaagccgttttctgcaaaacagcgatattgtacagcttggcagaaagcttcatgagataaatgcagatcagttcagactcaactatacggagctttccgtatatgccggtaaatgcggcatatcaatgaatgattcgcagcttgacaggcttatgcatttaagcgaggggtggttttcagccgtatatattcagcttcgaagtatggaagagtatggtgatatgacgggcgaaactcttgatatttacgagatgttcaactccgccctgatagatccgcttgaagaggagcttagagaatttattgcggtgatgagcattgcagatgagttttcgctggaaatggcagaatatattacacagaataagtgctcagaggagttcctgcggaaactgacggaaagcaatgcctttgtcagaaagcttgcaggcggaaatggctatcgtttccaccatatgctcaaaacctgcgcaggcagaattttttcacagtatgacaaatctgtgcaggaaaagtatctgaaccgttacggcagatggcacgaattaagaaatgagtatatcagagctatgatgttttatgaacgcatcggtaaccgcagggcatggcttggagttgttgcagaagacgcaggggtaatgctggcaggtctgaatccgtcagaagttatagaaactctgcaaagctgtacggcagatgaactcaaagagaatccatatgcgatacttgtgcttatgcgcaggctgttttcgtggggcaacatacctaaaatgcttgaacttaaagaactgcttaccgaagctgtcaaaaccgatgcggggcttacacaggagcagcgggaaaatctgctgggagagtgcgaccttattatgagcttcctgtgctataacgatattgagggtatgagcaggcttcaccggagcgcatgcagcaaaatgacccatacggcacagtcaattaaaacctacggttcatttacatttggttcaccgtcggtgcttatgatgtttcaccgcactgttggaaatatgaagcaggaggtggctgttatggagaatgccatgccgttttattacaagctgaccgatgagcacggagcgggagcagagcttgtaatgagcgcagaggaagcatttatgagaggtgagcttgccgcagcgggagtacttcttgcaaaagccgagtacagagccgctgagaagcatcagaattatctgcttcagtgctgtgactttataagactcagaaaaagtctgtttgacggcagcgaatacgtatattgtgacagtagtgaaatcagaaaacaccacgatacaatgctgatgcttgtaaatgacagcgttaattcatactattacgcgctggcaggcatatgcgagcatatacccgatagatttgcagagcatcatattgaatccgccaatattttaaatcctgcagttcctatgatgcagatgattgaaaatcaggtatatctggcgcagggcagctttgagacagtcatagcgcgcagcgaaaagcttatggaaatgtgccgcaggctcaattacgtccttgtgggaattcatattcagatacagactgcg

SEQ ID NO: 2513 - DNA, 798 bp, Unknown
  Unknown gut bacteria
acagaagcagatttagtaattaaaaccgacattggtcaggttactttagacaacaaaacccttgaaaccatggcagcagaggctgagggtgatactgtaagacttgttgtgaatggaaatacacagctcaaggaagcccagaaatctgtacttgatataatcggtgacagagggcatatatttgaccttggagcgatcataagcggcaagtatatccacgacttcaggggcggcagggctcacgttacactgcctgtgcctgagaagcttaaaggcaaggatatagttattatctatatcaatgataaaggtatctgtgagatattaaatcatactatggagactgtgggagcagagaagtatattaaattcacaacatcacacttctcaaactttgcagtagtagaaaaagctgatgcagagaaaatcatagctaagcagaatgctgataagataaactccttaaccaaggaagctaaactcaaagcaaccacttcaaagacagctaaaaagagtattaaggttaagattggagaggctaagaattcaaacagcctgattaaggaagcaaaggctatgggatatactgttaagtataaattctataagtcgactaagaaagcttcaaagtacaaggccgttaagacaaagacttcaaactcatatatcaacaccaaaggcaagaagggtaccaagtactactacaaggctaaggtgcttgtatatgacggaaagaatctgatagcacagactgaactcaagcagtgcagctatggggcaaggacttggagcaagtaa

SEQ ID NO: 2514 - DNA, 1422 bp, Unknown
  Unknown gut bacteria
gactttgacaagggatcatttgctttgctgatattcgaagatatggacgacaaagacgtatcagcggcaagagaaaaaatcgaagatctggaatacgtggactcagcgctgtggtatgacagcattgcagacataacagttccaaaggaaatacttcccgatgatatctacgatgaattcaacaacggtgactgcacactcatggcggtgttcctgagcacaacaatttcatcagacgaagctatggacaccatcaaggatatacgccagatagcaggcaaacagtgttttgtaagcagtatgtcggcatacataacagaccttaaagatctggcagaggcagaagaaccgatatatgtggcgctggcagttctgctggcatgcatagtatttgcggtatttatggattcattcctgctcccggttatattccttgcaagcataggaatagccattgtggtaaacctgggaaccaacatatttatgggtgaaatatcctatgtaaccaaagcaatcagcgcggtactgcagctgggcgttaccatggactactcgatattcctgtggcacagctactgtgagcacaaggataaaaccccggatcacaatgcggcaatggcagaggcaatcagggcaaccatcgcatcggtatcagcaagctcggtaacaactatagcaggcttcatagctctgtgctttatgagcttcacactgggagccgaccttggaatagtaatggcaaagggcgtagtgcttggtgtaatcgcctcggtaacagttcttccgtcattcatactaatatgcgacaaggctatcgacaagacaacccacaagccggttaacctgagaacagacagaatagcaggcttcgtgctcaagcacagaagagccatggctataatgttcataatagttatgatacctgccctttacggatatttaaacacagatcagtattatgacctcgaccagtcaataccgcaggatatggactgcgttgttgcaaacaccaaattaaacgacacattcggcatggactcaactcatatgctgctgtgcgattccgatatggctatcaaagactcaaaggaaatgcttgaccgtatagaagatgtagacggagtcaagctggtacttggcagagatacacttctcggcagactgataccaaaggatataattcctgacgatgtatcatcgctgctttcagaggggggtagacagcttgtaataatcacctctgaatacagagttgcgacagacgaggtaaacgctcagataaacgagataaacaaaatagttgatgattacgacaaggacgcaatgcttataggcgaggcaccttgcaccaaggatatgattaagattacatcgcacgacttcaaggttgtaagcttcatatcaattctggcggtactggtt

SEQ ID NO: 2515 - DNA, 1731 bp, Unknown
  Unknown gut bacteria
ggtacagaggctgagtatcaggcttactataaaaagaatgactgcaaggacatgagcggcaaaatagttctcgtaggtgtggatcagtggaatgatatatggattgacggtccgtatatggaagcggcagttcagaaggctgcggcaattgtgacatatcctgtgggaggatatgcaagctatgatgatgacacacttaatatgcaggacatatgtgcgcctgatatgaagatgccttgcacatcaataaccaagaacgatgcagtaaggatcaaaaacgtaatcgaaaacggaactgctgtaaaggctgagctttatgttgataatgaagtaggaagccagaacggcacatcatacaatgtagtaggcaaaatcaagggaacagcaaacacaggacagcagatacttgttgcagctcactatgataagtatttctacggttttgaagatgactgcatggcaataggtcttgttgcaggtattgcaaagactatgattgactcaggtttcaaacctgccaacgatattgtatttgttgcacatggcgcagaggaatggggacgtttcgatacctcaactgactgggcaataggctcatgggaaatgataacaaaggtacatcctgaatggcagggcaagacgcttgcgcttattaactttgaaatgccgggagtagacagttataatgacaacggagttatgcgtacaacttatgaagttggaggaataggaaaagacctgcttgcatcaggacttcttgcaaatgtgaagagcttctacaaaaatggagttgttgtgaagaatgacgacgatgaactgcctagaactgactgtatttcatatcagttcaacggagttcctgcgtttatgccaaggcaggaagataaatcacagtggtcaaagaacagataccatactcctagagatgataataatgtaactgataccaagggtgacggtgttcacagcaaagcactcattgaatatcagatggcactttactcggcacttgcgatgtatattgacggaacacctgcactggagattgattttaacagcagatgtgatgattttgaacaggcaatagaaggtaccgaaaaatatgcaacagcaacatccgttgcagaatacaaggcgcagcttgcagagctcagaactgcggctaaggcaaaccttgaggaagcaaagaaaataaacgccgactatgaggctgcatacaaggcaggcgatgcaaaggctatggaagcagcaagagcggcaggtattaagcacaatacagaagcacttaaagcatttaaatatgtacaggatgaatttatgggccttgcagattatggcgatatagaagttcatcacaagtgcctgcagaataaccttgacctgtatgataaggtggttgctgcgctaagtgatggtaatattacagaagatgatatctggattgcggcagacattaacggatattatgaaaattacgcatatctgtacagtgatgaagtatgcacaatgtcaaatgatcttctgatgaatacaaaggttgaaagcaactggggttcaaacaaaatgactcttgcaatcaaggactcatggaagacaacaaagaatatgtacgcaaaatggaatgaaggcgtaaaagatgcagcagagtacaaggtattcgcagatgaatacaggggctatatggatacacttaagactaagcttcaggcttatgtaaagagtgagacaggc

SEQ ID NO: 2516 - DNA, 1032 bp, Unknown
  Unknown gut bacteria
gactctatgggcggctcaggcgtatctgtaaatgtgttctgtgacgatacggataagcttcagcaggctgctgctgacattgcggatatcataagtgatacagagggcgttgtaaatgttgaaaacggcatagaggatgcagaccctgaaatacatttcacagtggataagaaaaaggctatgaagtacaatctgacggttgcgcaggtatatcaggaaatagcaaaggctctgtcagatgaaaaaacagcaacctctgttaaatggcagggagatgactacgatgtcatagtcgagggcgcgaacgcttcggagcttacaccgaaattcatcaaaaactataagtttaaggtgcaggacagtgacggcaatgaaaaaacagtaaaactcaaggatattgcagaggttgaagacaagaccacaatgcactcgataaacagaatgaatcaggaaacctatctgacagttaagggtgaaattgatgaaaaccataatgttactctgactacagatgaggttatgaagaatatcgatgagaaatatgactgccctgaagatgtgacatatgagtcaagcggactttccgaaacaatatatgatgcgatgaaagatctggtacttatgatgcttctcggtataattatgatatatcttgtaatggtagcgcagttccagtcgctgttgtcgccgtttatcattatgtttacaatcccgctggcatttacaggcggcctgctggcgctgcttgtaacgggcaaggagataagcattatcgctatgattggttttgtaatgcttgcaggtataattgtaaataacggtattgtgctggtggactatatcaatcagctgagagcaaagggtgtttccaagagagaggctatcattgaggcaggcaggacgagaatgaggcctgtgcttatgacaagccttaccactgtgctggggctttcggtaatggcggcaggcaagaccgcgggaaccgatatgatgcagcctgtggctcttgtatgcataggcggggtttttttt

SEQ ID NO: 2517 - DNA, 1302 bp, Unknown
  Unknown gut bacteria
atgttagataacaaaactataggcaaggctatgactatcaagctgggcaatgaacttcccgaatatccggagtttgatgacagcaagagaagagcccctgacagaggcttcagacttaccaaggcacagacaaaaatagcattaaaaaatgctttaagatacgttcccgaagagcttcacgaaacactggcaccggagtttatggaggagcttacaacaagaggcagaatttatgcctacagatacagacctgagggcagaatttacggaaagcctgtagaggaatacaagggcaagtgccttgcaggcaaggcatttcaggttatgatagacaacaacctggactttgaggttgcgctttatccttatgagcttgttacatacggcgaaacaggacaggtatgccagaactggcttcagtacagacttatcaaaaaataccttgaggagctgacagaggatcagactctggtagttgaatcaggacaccctctgggactgttcccgtcaaagcctgaggctccgagagtaatcataaccaactcaattatggtcggaatgtatgacaaccttgaggactgggaaatcgcagaggaaatgggtgttgcaaactatggtcagatgacagcaggcggctggatgtatataggaccgcagggtatcgttcacggtacattcaacacaatattaaacgcaggcagaaaagagctgggcgttcccgacaacggagatcttgcaggctacacatttgtatcctcaggtcttggcggcatgagcggagcgcagcctaaggcagcaaacattgcaaacgcagtaggtatattcgcagaggttgacctttcaagaatacagacaagacacgatcagggctgggtagacgttataatggacgatctcgatgagatttttaaactggcagacgaaaaacgcgctgcaaaagagtcaatatcaatagcatatcacggcaatatcgttgacctgcttgaagctgctgttgcaaagaacttcaaaatagagcttctttcagaccagacttcatgccacaatgtatataacggaggctactgccctgcaggacttacatttgaacagagaacagcgcttctccacgaggacagagacgaattctgccgcagggtagacgaaactctccacagacattacaaggcaatcagagccctgacagagcgcggcacatatttctttgactacggcaactcctttatgaaggctatgtatgatgcaggcatcaaagaaatctcaaagaacggctacgacgacaaggacggatttatctggccg

SEQ ID NO: 2518 - DNA, 873 bp, Unknown
  Unknown gut bacteria
atggaaatgaaaagaaaaggattggcgttaatactggcgctgacagtgacaattgtgatgtgctttaccggatgcggcgacaaaggtgtaagcatagactcggacctgtcaatggcagcagatgttgagaagtatgtaaatgcaatagatattgaatatgcatacgatctgacagaaaaacttgcatatgatgaggaatactgggactgcgaactgggctggagaactgcaggctcggatgcagaacacagatgtgcagatttccttgcagaagaaatggagaagatcggacttaccgatattgaaaaaattccgacaaaagttgataaattccagttcaatgattcaagccttacagttgacggaactgaaatagatcttacccctgcggcatatcagtgctcaggtacagacaaggacggaattacagcagaaatcgttaatgtgggcacaggctttgaggcagactatgacggtcttgatgtcaaggataaaatagttatcgcacaggttgaccaggccaatgagtcatggattgacggctacataagacaggctcacgaaaaaggtgctgcagcacttgtaagttatgcaaacagcggctacggcgaacttaatgaagatactgcaaatgttcaggatatatgctgcgcagaccttatccctacagtagcaataagctataatcaggcacaggacgttcttaaagccattgaagcgggcaacaacaaggcgactcttatggtagatgccgagtttgaacctgataaaggcacttcctataatgtagttggatatatcaaaggtaaatcctcagatcagcagattatgctgtcaggtcactacgataaatactggtacggcttccaggat

SEQ ID NO: 2519 - DNA, 864 bp, Unknown
  Unknown gut bacteria
atgtcagttaaagtagagaacctaacacatatatataacgagggtctgcctcacgagtcggttgcggtgcaggacgtcagcttttccatagaggacggacagatagcggggataataggtcataccggttcgggcaaatccacgctggtgcagcatttaaacggccttatcaagccaaagacaggcagcatatatatagatggagaaaacatctgtgacggcaagactgtaatgcgtgagatacgcaaaaaagtggggctggtatttcagtatccggaatatcagctttttgaggagacggtatttaaagacgttgctttcggacctaagaatatagggcttgcggacgaggagcttgaggacagagtaagagaagccatagaacttgtgggacttgactatgagcagattaaggacaagtcaccctttgacctttccggaggacagaagcgaagagtcgctatagcaggagtaatagcgatgaagcctaaggttctgatactcgatgagccgacggcgggacttgaccccaaggctcacagagatgtgcttgatatgataatccgcgtacacgagcacgagaacaatattaccataatggtttctcacaatatggaggatatagcttcaatgtgcgacaaggttatagttatggacagagcccatgcggtaatggagggcacgcctgaagaggtctttgcaagaagagcagagctcaaacagatgggacttgcagctccgcctgttacggaacttatagatatgttaaatgacaggggatttaagcttgacggcaatatcctgacaagagataaggcggtcgaagaaatatacaaggcaatcagaggaaatataaatgcttag

SEQ ID NO: 2520 - DNA, 1152 bp, Unknown
  Unknown gut bacteria
aaaaaaatgaaaattaataaaatagcctatggcatagcgataataattcttattatgttttcggcgtatttttcggcaacagaaacagcgtttacatcggtaaaccgcatcaggattaaaaaccttgcgggaaacggcgacaaacgggccaagcgcgtacttgagcttacagacaaatacgacagcctgctgtcaacaatacttatcggaaacaatatcgtaaatatacttataacggttatagccactctgctgtttgttgagctttacggttcgctgggacctactatagcgacagtcgttactacggtccttatcctcattttcggcgagataacacctaagagtcttgccaaggagatccccgaaaagacctcaatgggcttcggcggcagcatcagatttgttatgatgattttcacccctttaaacttcctgttcagcgcgtggaaaaaacttgttgcaaaggcgttcaaaatggacgcggagcagggaattaccgaggaggagctgcttacaatggttgaagaggccgaaacagagggcggtcttgacgaggagcgaagcgagcttatccagaatgccatagagtttaacggacttgaggcgtgggatatacttactccgcgagtagatgttgcagccattgaggttgacacctgcaaggatgatatactcaagcttttcagagatacgggattttcaagaattccggtatatgatgacgatatagacaatatattaggtgtgctcaaccagaaggatttccacaactatatatacggaacaagcgcagatatcagagagtatgtggcgccggtggtattcattccggagactatgaagcttccggttattctcaaaaaaatgcagaccaccaagacgcatatggcggtggtaatagacgagtacggcggacttgccggaatagttactcttgaggatatattagaggagctggtcggtgagatatatgacgagcacgacaccgttatttctcaggaaataatgccgctttatgacggcagctacagagtcaagggcagcgccaatgttgagaagctctttgacttcttcgatgttgatgactatatagaccctgttacagtcaacggctgggttgtgctggagcttgacaagctccctgaaaca

SEQ ID NO: 2521 - DNA, 1446 bp, Unknown
  Unknown gut bacteria
aaaggctatacaagcgacactataagaaacgttgcattattaggtcacggtggtgctggtaaaactacattcctcgaagcagcattacttgcgacaaaggttataaacagattaggtaaggttgaagacggaaacacagtatccgactacgataagatggaaaaagaaaaaggctattcaatcggcacatctatcgttcctgtagaatacaacaaggttaaaatcaatttccttgatactccgggtttctttgacttcatcggtgaagtaaacggagcattaagagctgtagaagcagcagcaatcgtagttgatgcacagtcaggtattcaggttggtaccgaaaaagcgtgggattcctgcaaaaaagctgatatgccaagattcttcattttaaataagatcgacaaagaaaacgttgatacagcagcactggtagacgaattaaaggctaagttcggttcatctgtagttactttagatgacagagagtcattagaagaagaagtagcaggtactgacgaagagcttatggaatactaccttgaaaatatggaacttacagacgaacagtttgcaaagggcctttcaacaggtatcgcaagcggagatatcgttcctgtatttgaatgctcatcagtaacaggagacaagattacagacgtacttgaatcaatcgttaaatacgttcctacagcaacaggcaaggaatacgaaacaacagagggcgaaacagttaaatgtgatcctaacggcaagatggcagcactggttttcaagactattgcagacccgttccttggtaagatttcacttgcaaaggttatctcaggcaaaatctcaacaggtatggaagcatacaacacaagagcagagaaagctgagaagctgggttcagtattcttcttaagaggtaacactcagggagatgcaccgtcagtatcagcaggcgacatcgttgcatttgcaaagctgcagtacactcagacaggcgacacactctgtgacaaatcagcacaggttacattcccgccaatcgaattccctgcaccgtcactttacaaggcagtagaagcagctggcaagggcgaggacgaaaaggttggaacaggtctccacaagctgatggaagaagatccgtcattcgtatttgaaagaaacgttgaaactcatcagtcactcctcggaggccagggagaaattcagcttggaataatcacagctaagttaaaggataaattcggcgtagaggttaaagaagttcctcagaagatagcttacagagaaacaatcaaaggtaactcagatgttcagggtaagcacaagaaacagtcaggcggagcaggacagtacggtgacgttcatatcagattctcaccttcacaggaagaattcgaattcagtgaagaactgttcggcggctcaattcctaagaactatgttcct

SEQ ID NO: 2522 - DNA, 432 bp, Unknown
  Unknown gut bacteria
atgctgtttgattcatttccggtgctgaaacaggcttatgaattaaaagaaagctatcgcagaatgagcagggaatactcttatgaagaagctgctgcacattacgataaaatttcagacagattcaggcgctgtggaattacacaatatgaggaattcacaaatatactttttacatggaaagaggaaatcctcaattcatttctgcgcccgtataacgatagaaagctgtctaatgcatataccgaaaacattaacagccaattgcgcacatacctttctgtttcaagaggaataagcaacttctcacgcttcagaaaaagagtcatatatgcactttctcctgatatccgttatgctctcacctcaactctatccgactgcaggcagaacaggcgaaagcgcggttcataccataaagtaaaagattaa

SEQ ID NO: 2523 - DNA, 888 bp, Unknown
  Unknown gut bacteria
gtgaaaaaattgcttacaaatgcaccaaaaggaacgaaagatatgcttcctcaggacgcatacaaatggaaatatgtaagaaacgcttttgcggacatctgcgcaaaatacggcttcaaacagattgcaacacctgtatttgaacacacagagctgttcaaaagaggcgtaggcgacacaaccgacatcgtgcagaaagagatgtatactttcacagatttcggcaacagaagcattacattaagacccgagggaacttctcctgtagtaagatcatttgtagagcacaaggcttatgcggacccgcagcctacaaaatatttttatgacatatcctgcttcagatacgagaagcctcagtcaggcagactgagacagttccaccagttcggaatagaaactttcggaactgacaatatgctggcagacgccgaggttatatcccttggatatgaatttttaaactctatgggtattaaggatatagagcttagaattaacagcatcggatgtccgaagtgcagagaaaagcacagagctgccctaagagaatttcttgcagacaaatatgatgacctttgcgatacctgcaaggacagatacgagagaaatcctctgagaatattagactgcaaatcacccgtatgtcaggagctggtgcagggagcgcctgtaatgctggactacctgtgtgacgactgcaggaacgcgttcgaggagcttaagcagaaccttgaggctatgaacattgaatatgttgtagacccgggaattgtaagaggacttgactattacacaaagacagcctttgaatttgtaactgcaagcataggagcgcagggcactgtatgcggcggcggcagatacgacaaccttatagaggaagta

SEQ ID NO: 2524 - DNA, 1425 bp, Unknown
  Unknown gut bacteria
atgtcattaaatgcaaaagaatatgttgcaggcctagttgaaaaagcaagaaaagcgcaggcaattgctaacaactttactcaggaagatgtagatcttattacagctgctgttacttataatcttactaaacctgaaaaggctaagatgtatgcagaaatgctggttgaagaatcaggtatgggtattgcagaagataaagttggcaaaatctacggtaaagtatggggagcatacatccagatgaaggacaagaagtcagttggacttattgacgacaacaaggaaacaggtatgcagacttatgctaagccaatgggcgttgttgccggcatcatgcctgtaactaacggtgaagcaactcctatcgttaagtcaaacatggcacttaagacaagaaatgctataatcttagcacctcaccctaagtgcaagaaattaaacgttgttatcgttgacgaaatcagagctactcttaagaaattaggatatcctgaagatttagtacagacttgcgcacctgaatgggttaagctggaaacttcacaggaattaatgaagcagtgcgatttcatacttgcaacaggcggagaagcattagttgaaactgcttactcatcaggaactcctgctatcggcgttggcgtaggtaactgcgtatcaatcgtaacaggcaagactccaatggacaaggttgcagaaatgatcgtaacttcaaagaaatacgataacgctacttcatgctcaacagaaaacaacatcatcgtattcgaagactgctatgatgaatttgttaaagaaatggaagcacacggtgctgttctgttcaaagaaggatcagaagaaaagacaaagcttcagaagactatgtggccaaacactcctaacgaccacgtattaaacagagcaatcgttgcacagaatgctgaaactatcgctaaattagctgatatagaagttcctgcaggaacaaaagtattaatggctgaagaaaacggcgcaggacttgatcacccgttcgcaggcgaaaaactgtcacctgtatcaggcgttcagaaagctaaagaccttgacgatgcaatcgacaagatgatggcttgcttaaactaccagggtaaaggccacagctgcggtatccacactaatgacgacgaagacgttgctagagtagcatcagttgctcctgtaactaagtgcgtagtaaaccagcctcagtgcttaactaactcaggcggatggaactgcggattccctgtatcaatgacattaggctgcggtacttggggcggcaacagtgtatcacacaacgcaacttacaaagatcttcttaacttcacatacgtttcaagacagattcctaactggaaacctgaaaaggcagaagatttcatcgatgcagcagtaatcgctaaggttgatgcttaa

SEQ ID NO: 2525 - DNA, 651 bp, Unknown
  Unknown gut bacteria
gcatctaacgatatacagttctatacctgcgatgctgttacaatagcaagagagctgggtctgggcggaagaaccaatacagttttacaggcggcattcttcaagctggcggatataattcctattgataaagccgcagtatatatgaaggaagcaattaagaaaacctacggcaacaagggcgaaaaggttgtaaatatgaactgcgccgcagttgatgcaggtattgccaatgttgttaaggtagaggttccggaatcatggaaaaacgcttccgacagcagcagaaaacagagaataaagggcagagacaaagctcttacagactatgttgaaaacatactcatgcctacaaatgcaatggacggtgacagcattcctgtatcaaaattcgtatcgacagcagacggctctgttccgtcgggaactgcagcatacgaaaaaagaggaattgcatatgcagttcctaagtgggacagcaccaaatgtatgcagtgcaactggtgttcatatgtatgccctcacgcagcaataagaccgtttgtattaaagcctgaatgcgaatgtgacgaggcggttaaaatgagaggcgacagcaaccttaaatttatcgttgcggtatcagctatggactgcacaggctgcggctca

SEQ ID NO: 2526 - DNA, 1134 bp, Unknown
  Unknown gut bacteria
atagttacaacctattcactgtcaatgctctgcgaacttccggcatttcttgtaggcggcatgcttataaacaagtttggaatgaaaaaaatacttaccatctgcggtgtgctttatggcctgtcaattctggtaagcggactggctacgaatgtatttgtatttattatgtctcagggtataatgggtgcgctttcaatgtatgggatttttattgcaaccttatcactgataaatgtgctttaccccgatcgcaaaggtctggttatgggcgtgctttacggaagtcaggcggcgggaggcgctttaatggctccgcttgcgaattatttcatcggaacattcgatgtgagtatggcgcttatacttcagggaattatctttacagttataatgtttgtatgctgcctgcttgtatcagatcctactaagggtgataaggagcttcaggcaagaatacagcaggagacagaggaagccgaggctgcagaggctgtcgcaggaaaagccgaaaatgagcttccggttatgggctggaaaaaagcctttacacatcctgctttctggcttatgttcatatcaactatagcgatacagatgataggaaatgtgctgattacggatatttcttatcttgcagaaaacatatacggagtaaatgaaacagagtctgcctgggtagtttcggcattcagtataggtgcgggaataggcggtatagttataggatttatatctgataagataggaccgtacaaaaccaccttccttctcggaatctttgacggaattgtacttgcgatacttgcggcagcaggtgcgggcagctttatgctctttgcagtaatatgcatagtacagggatttacatacaatggcatgacagcattgaaccctataatgatgacggacagctatttggcaaaggaccttggaacaattatgggtgttatgggactttcctatcttgttgtaggtgttgcagggccacagcttggacttgaggttgcatttgtgccgatgcttggaatatgtgcagtgcttagtattattggcggatttatggtaagaattgcgaaaagctctcttaacaagtactataaatcagtaaacagcggctgcgttataagataa

SEQ ID NO: 2527 - DNA, 1059 bp, Unknown
  Unknown gut bacteria
atggcaaacacattatacaaaatgactcctaaagaaatcgtacaggagctggataaatatataatcgggcaggacgaggccaaaaaatccgtagccatcgccctcagaaacagatacagaagaagtctgctttcagaagaaatgagagaagagataactcctaaaaacattcttatgatgggacctacaggcgtaggtaagaccgaaattgcaagaagacttgcaaagcttatggacgcaccgtttgtaaaggttgaagcgactaaatttacagaagtaggctatgtaggcagagatgttgactcaatgataagagatctggttgaagcatctttaagagttacaaagcagtccaagcttgaggaaaaatacgatatagcagataagattgttgaagaaaaaatagtcgaggctataataccgggcaaaaagaaaaaccctgccaaaacaggctccagaaatccgtttgacttcataatgaacagcggcggatatcagagccagaagcaggaatacctcgaaagccatcaggaaaacagcagtgtaaacgaggactccggtgttgaatcagcaagagagcaggtaagagagcagcttcgcgcaggacttttagaggagcagtatatcgaaatcgaggttacggcagctccaaagggcaaccagcttgatatgagtaatgaaggcatgagcattgcaatcggcaacatattcggtgatatgatgcccgaaaagaaaaagaaaaagaactgcaaggtcaaagatgcaagaaagatattaagagagcaggaagcccagaagcttatagatatggatcaggttaccgatgaggcagtcgaaaacgccgagcagaacggtatcatatttatagacgaaatagacaaaatcgcagcaggcggacagtaccgctcgggagcagatgtgtcaagagagggcgttcagagagatattctccctatagttgagggaagcgttgtaaataccaagtacggacctgtaagaacagaccacatcctcttcataggcgcgggagctttccacgttgcaaagccgacagattta

SEQ ID NO: 2528 - DNA, 1119 bp, Unknown
  Unknown gut bacteria
aagcttggcggcgcagattatcttgacagcatttcggaagatgaaataaggataacctggatagacaaaagcggcaaggttctttacgacaacagggccgatgcctccgaaatggaaaatcatctcgaccgcgaggagataaaggaagctgtcgcagacggctatggaacggctataaggaactccggcacaatgtcggtgcagaccgtatattacgctctcagacttgacgacaatactatattaagggtttcttcaaatcggtatacatttttaacggttctcaagggtatgataaaagcaattctttttatttttgcatttgcccttattctcagcgcactcatagcgttcaggctgtcatcaagaattgtaaagcctcttgagaatatagatattgacaatcccgatgaagaggaaatctatgacgaattaagacccgcagtcagaagactcaaatcccagaatcagaaaatactctcacagatagatgagcttaagcttcagcaggcgcagcttaatgccacaatggaaagtatgagcgagggcatgattataaccaatacaaaggctgaaatactatcctgcaatcacagcgctctcaggctccttggctttaccggcgagggcagtccttttcatgtgctggatctcagcaaagacgacaggttcagatatgcggtgctttctgcgctggagggaaaaagaagctcctgcaccatgcatataggagatacctactgtgaggtaatagcggctcccgtaattcacgagggcgaaaaagagggccttgtaataatggtaatagatgaaaccgaaaaagaaaaacgcgatgttctgagaagagaattcacctcaaatgtttctcacgagctcaaaacacctctaacctctatttcgggatttgcagagcttatcaaaaacggccttgcagatgaggataccgctgtgagattttcagataatatatatagggaggcgcagcgcctaataacccttgtaaacgatataatcaggctttcacagcttgacggcggagaaattccttacgataaagaacctgtggatctgtatcaggttgcttcagaggttgtttcacgtcttgcacccgttgccgaa

SEQ ID NO: 2529 - DNA, 840 bp, Unknown
  Unknown gut bacteria
attgcggaaatctgcgaagctgacggtactgttgtttcaatcgaaagaaagggcagcaagagagaggttataatcagaggcgatgaggaaagagcatacacagttccttacggagctatcctcaaagtaaaagagggcgactatatccttgcaggaagccctataaccaagggacctcttaatccgcatgatatactcagattaaacggtgcagagggcgtataccagtatctgctcaaggaagtgcagagagtatacaaaaaccagggtgtagatatcaacgacaagcacgttgaggtaatcgtaaaccagatgctttcaaagttcaaaatcgacgaatcaggagacacagacctgcttccgggcggactttacagcaaatttgaaatagaagaagctaatcagaaagctattgaagagggcggagagcctgcaaaggctgacagagtgctgctgggtatcaccaaggcgtcacttgcaacaaactccttcctgtcagcggcatcattccaggaaactacaagagttctgacagatgcggctatcaagggcaagaacgacaagcttcagggacttaaagaaaacgttataatcggtaagcttattcctgccggtacaggaatgaagagatacagaaacatcgagctggactacggtgtaaatcaggaacttatggaagcctatgaggctgcacagtatgctgcgcagtttgaagaagaggtcgaagacgagcagcctgaggacatcatggagccggcagaggatatgtttgaagaagtggaagacgaaagcttcttcgaaatgcctgatatcattgaatttgaagacgaagaaaactag

SEQ ID NO: 2530 - DNA, 627 bp, Unknown
  Unknown gut bacteria
ctccttgccaatctcaattacactctctccatgatctctgatgaacttgatatatcctccacccagctaagtacatatattgattcatacatcacaatccctgcccgcactctccctgaatgccttggaattgacgaactgcattcaaaggaactgtcccgccgcaattccggctatctgtgcatacttgttgataacgaaaaacactcgctttatgacattcttgattcaagaagcaaaatgaatctgtcgctttacctctccggctttccaaaagaacagcggtgtaaagtcaaatatgtgaccattgatatgtgggaaccttacaaagatgcggcaaaaacatatttcccaaactgcattatcgctgtagatccgtttcatgttgtaaagcatcttcatagcaattttgaccggctcaggattgatcttatgaatcagtgtgaatatggctccaatgcatattatcttcttaagaaatggagccggcttcttgttactgacaatgtcaaccttgataatgagcgtgtatataaccggcgatttcacacatggcttaacaggagagatttaaaagatatgctgtttgattcatttccggtgctgaaacaggcttatgaattaaaa

SEQ ID NO: 2531 - DNA, 630 bp, Unknown
  Unknown gut bacteria
atggaaaagatttttagacttaaagaaaacggtactgatgtgcgtaccgagatttttgccggccttaccacgtttatgaccatggcatatattatagcactgaatccgaatatcctgacagcctttggctctgagggcggatctgaattatggaacggtgtgtttcttgcaacctgtattgcctcggcaataggcactttcgttatggcttttgctgcaaacaagccttttgttatggctcccggaatggggcttaacagcttctttgccgttgtagttgccaacattgtaagccttacgggtatgtcatatcttgagtcatttcaggcaggcttatgtataattcttgttgagggtattgtatttcttgtgctctctgtacttaacattcgtgaaaaaatcgttgatgccataccgcttggaatcagactcggaattgcacctgcaatcggactgatgcttcttaatatagggtttggctcaaacgcaggcgtttccaataaggacggcgggatgttctatgttatgagagatttcttcggctcactgacacctgcccttgcacagaaaaatattgcggacggttatcctcagatggtgcttgccgttataacgatgtttgtgggactg

SEQ ID NO: 2532 - DNA, 876 bp, Unknown
  Unknown gut bacteria
gagcaggcgccggcaattacagtatcgggaggtcaggcttactttaacgaggcacttccgaaagcgacagccgttgaggcaggcgcagggtcaattacggctccgggactttcaggtatggacactgtaaatacatacaaccaagccgaggcgacagacagcgagaaatcgggcacaggatatatatatacggattttaattccgagtggacaaaaggaataacctgtgacaaactgtgcatggctgatgtcgataacgaatatttcttcaaaggctgtatgaagcttaacagctccaaagcagacaaaatcgagccatggggcggactgtggcttaacgccaaaggcaagagcagcaccaatcttctttgcggcacaggactccttattacaggaaacggcagcatagatgcagatgaactttcactgtttggctggggtaatgtgcacaaacctgtatttgcagtaagagatgatgcggcagtaagctgcggcagcttcacaatggactccgaagcaggtgaagagggcagatttatcatagacgaaaatgcggctttcagttgcaggggtaatctgtggatgaaaaatgcggcggttatgataagaggaggcaatgctgaatttgcggcagattttgcagtggaagcaggcagagttgaaatctcaggaggcacagtcgtactcaatacgctttaccttgcagacggagatttagaaataagcggaggcaaggtcatagttgcacagaacatagatgttccgaaaggtaacgttactgtcacaggcggcgaggttataattccgggcggcgaagacggtttcaatgtatcggagggcaagcttaccgtcaagggcggcagcattcacgaatag

SEQ ID NO: 2533 - DNA, 807 bp, Unknown
  Unknown gut bacteria
ggcgacgtcaatattgtgatgacctatgatgagggaggcaatgatgcgcagatttttgagattacaggcgcggttattgcgcagcttgaaaagcttgcctttgatatgggagcagacttgtctgtaaaggctatagaggggtatcacaaaaacagaagcgtagctattgagcatctcgaaaggcagctttacagtctgcctgcagagcctgtggaggactgcggcggtataacccttgttcatgcggcaggggtgtatcaggaggccgaaaccgcagctttgtatattatggagcttgtcagagacaaggggcttaaatacagagatattgcggtaatctgcaacagtatggataaaacagcgcctgtgattacaagggtgtttgaaagatatgatatccctgtgtttatagacgtcaaacgaaaaatagtatccagcgccgccgtcatattcatactgacggttatggagataatagtttcgggctatgagtcctcgagaattttcagagtcctcaaaagcggctttacggattttacggaggatgaaatagaggagcttgaaaactattcacttaaatacagaataacaggctccggctggaagaaagagtttgccaaggggcataaagaatattcggaggaagagcttgctgcccttaacgacatcagaagcaggattatacagatgctgtcaggcttcgatgaaagcctcaaaaaagctcatacggcaggagaaaaaataaaggctctttacagcttcctcacagaggtatgccatatgcccgaaagaatagaggaggcggct

SEQ ID NO: 2534 - DNA, 966 bp, Unknown
  Unknown gut bacteria
gtggacaaccagtcagacaagacagcggctgtaacagcagctcagcagcttatcagtgacggagttgtaggcgttctcggatcatacggttcaggcgttgctattgcagctggagatactttcaagactgcagcagttccggcaatcggctgttcatgcacaaaccctcaggttacatcagacaacgaattctacttcagagtctgcttccttgatccgttccagggtactgtaatggctaactatgcagcagatcagggatacactaaggcggccgttatcgctcagaacggtgacgactactcaacaggtcttgcaggctacttcaagactgcatttgcggaccttggcggtgaaatcgtagctgacgaaacttacaacacaaacgaatcagacttcaacgctatcttaactaaggttaagtcagcagatcctgactgcatattcatcccttcatcaattgcaactgcaacattaattcttccgcagattactgcaaacggaatcgatgctcaggtacttgcaggcgacacttgggaaaacgcagcaatcatctcaaaggatatggttggcgcagcattctcaactttctttgatgaaaacgacgaatcaaaccctgtagctgttgaattcgtaaaaggattcaaggaatacttaaacagcagcaagcagaaccttacatggaacagcggaactgatacagtagctgcagtttcagcattaggttatgatgcttacatggctatgtacaatgcaatcgctgcattagacggtgatacagttaactcagttgcaatcagagatgctctttacaatgtaaactttgacggcgtaacaggaaacatcactttcaacgatacaggcgatgcaaacaaggatacagcttacatcaagacttgcacagacaagtcattaaagagtaagagctttgaattcttaaagactcagactgtagaagctaaataa

SEQ ID NO: 2535 - DNA, 924 bp, Unknown
  Unknown gut bacteria
acaatgaagaagatgggcgtcgattttacatttgtatccccatatgctacagacgaagagcttgatgccgcattcaagcctaataccaaggctgtattcggagaaacaatagcaaatcctgcgcttactgttttagacatcgagaaatttgcagcggcagctcacagacacggcgtaccgctaatcatagacaatacatttgccacccctataaactgcagaccttttgaatggggcgcagatatagttactcattcaactacaaaatatatggacggccacggagcaggcgtgggaggctgtattgttgattcgggcaaattcaactggcttgaacatgctgataagttcccgggactgtgcactcctgatgacagctatcacggaatcacctatgctgagaaattcggtatcgagggcgcatatataaccaaggctacagcgcagcttatgagagatttcggttcaattcagtcaccgcagaacgcatatattctcaatctgggacttgaaagccttcatgtcagagttaaaagacactgtgaaaacggacaggcagttgcggaattcttaaatcagcatgataaaatagagtgggttaaatactgcggtctcaagggcgacaaggactacgaaatgggacagaaatatctgccaaacggttcctgcggcgtagtaagcttcggagttaaaggcggcagagcggcagccgaaaagtttatggcaaatttaaaagttgcagctatagaaactcacgttgctgacgcaagaacctgctgtctgcatcctgcaagctcaactcacagacagatgacagacagtgagcttgaagcggcaggcgtatcacctgaccttgtaagatattcctgcggtcttgaagatgcggctgacctgattgctgatattgaaaatgcactgaaatag

SEQ ID NO: 2536 - DNA, 1110 bp, Unknown
  Unknown gut bacteria
cctatagagcttacaaaggaaatccttgaagaacagggatatacaacagatatagaagaatttgaaagctacatggaaaagcaaaaggaaactgcaagagctgcaatcaaagacaaggacagcgtaggctggaaagaagcaggcgcagagcttgactttgacaagacacagtttacaggctacgaaacaaagacatgcactgccaagatacttgctatactcaaagacaacgcacagattgcagagtcagatgctgcggcaggtgaagtatctgttatacttgacagcacaccgttttatgcagaaagcggcggacaggttgcagatacaggtataatcagtacagacagcgctgaagctgcagtaacagatgttcagaaaacaaacggaatatttgtgcataaagtaactgtaaacaagggaactctaaaagcaggtgacgaggttaaggcagcagttgatctcgcagtaagaaacaatattgcgagaaaccatactgcaacacatcttctgcacaaggctcttaaggaagtcctcggaaaccacgtaaaccaggcaggctccaaggttacaagggaaaacctgagatttgacttcagccattatgaagctgtaagcaaggaagaccttgcaaaagtcgaagctcttgtaaatgcaaaaatcaatgaatttacagatgttgaaacagaaatcaaatcagcagaggaagcaattgcagacggagctaccgcactgtttggcgaaaaatacggcgatacagtaagagtcgtaaaaatcggtgatttcagtaaggaactctgcggaggaactcacgtttcggatatcggtgaaataggcgcatttaaaataacaagcgaaagcggtgttgcagcaggcgtaagaagaatagaagcggtaacaggttacggtatttatgaaaaatataatcagaatacagccgtaatcaatgagactgctgaaattctcaagacaaaccctgcaggcatagccgaaaaagctgcagcgcttgctgaggaagtaaaagcactgaaaaaggaaatagaggagcttaaaaaacaggcaatgggcgaccagatgggtgatattctggcagaagctaaggatataaac

SEQ ID NO: 2537 - DNA, 690 bp, Unknown
  Unknown gut bacteria
agatttcgggactggcgtacagactgcacaatcgagtcaagacagtttcagatagcattcaggctgctcagggaattgtcacgaaagcttgacagcagcgatgaggagctggatatacggggaactgttgacggcacatgcagacaggcgggtatcttggatattaagatgcagccgccgagaaaaaacaggctcaagctaatggtgcttattgactccggaggttcaatgaagccttacgaggagctgtgcagcctgctgtttcaatcgcttaataaggctaataccttttcggatctgaaaatatactattttcataactgtctggaggataagctttacagggatccgtctataaatcctgcggataccataaaaaccgactgggttataaggaatatttcaaaggaatacaaggttatttttgtaggtgatgcagatatggcaatgcacgagcttatggacggatcacaaagcagctggtctgtgtcggagagcaatgacgggataacgtggtttaaaaagtttcgggaaagatacaggcactccatatggcttcaccctcaggagagagaggaaaatatagcgtggatgccggagtcttttgctgaaatcgaaaaggtatttcccatgttcagactgtctatagacgggcttaaagacggtatgtacagactgcttcggggctga

SEQ ID NO: 2538 - DNA, 825 bp, Unknown
  Unknown gut bacteria
tcgcaggagctgattgatcagtttctggctttcagcggaggacattttgaagccatgacaggcgggaaaatcaactccacagagctggtcgcctcgatgataaaccagaaaagcgattttcttgagggaattaaattcgcacagagcattatcgagggctcggcttcaattgtaatactaaaagaagacggccgcattatagcggcaagagataaaatgggcagaaccccgctgcttataggaaaagacgctgacggacactgtgtgtcatttgagtcttttgcctacgaaaaactggggtatgaaacagttaaagaactcggaccgggagagattgcggagatatccaaagacagcatagatattctgcaaaagcccggcagagatatgaaaatatgcgcgtttctctggacctactacggataccccaactcaacctatgagggagtaaatgtagaggtgatgagaaaccgaaacggcagactacttgctcaatatgatgatataaacggcaagagctttgatctggactacgtcggaggtgtgcctgattcaggagttcctcacgcaataggatatgccaacgagtgtgacgttgattatgcaagaccttttataaaatacacaccgacgtggcccagaagctttatgccaaccaatcagtcggagagaagtcatgttgccaaaatgaagctggtgcctgtcacagagcttatcagggacaaaaagctgctgtttgtagacgacagcatagtaagaggtacccagctcaagggaacagttgattttctttacgaaaacggagcaaaggaagtacatatgcgt

SEQ ID NO: 2539 - DNA, 978 bp, Unknown
  Unknown gut bacteria
atgctgtgctttgctacaggtgatgaagcagaatatgtacctgctttatttgaaacatggtggtcagtaattccgccgctggtagctataggacttgctctcataactaaagaggtatacagctcactgtttatcggtgttgttataggcggagtgctttatgcaggcggtaactttgaaatgacaatgaaccacgttcttcaggacggcattatcggttcactgtcagatccgggcaatgtaggtatccttattttccttgttatactcggtgtaatagtagcactgctcaacagaacaggcggcgctgctgcctttggtaaatgggcaatcaagagggttaagactcagacaggcgtacagattatgacaataatccttggtattctggtattcgtagatgattacttcaactgtcttacagtaggaagcgttatgtcacctatagcagaagcacagggacttccaagaacaaaactggcatatcttatagattcaacagcagctcctgtatgtatcatcgctcctatctcatcatgggcagcagcagtaacgggctttgttgacggcgaaaacggtttcgcactgtttataaaggctataccttttaacttctatgcgatattaactatcgttatgatgtttacattagttgcactcaagttcgactatggtacaatgaaaaaatatgcagacaagctgctggatgacactacagacacgcaggcctcagaccttgaaacaactgttgcagtcaacagaaggcgtgaaggcggagttatagatttagtattacctgttataattcttatcattgcatgtgtaatcggcctgatttataccggtggtttcttctcaggcgcaggctttgttgaatcattctcaaattcaagtgcttcggtaggccttgtaatcggcagcgttataactttaataatcacagttataatctatatgatcagaggagttatcagtttc

SEQ ID NO: 2540 - DNA, 831 bp, Unknown
  Unknown gut bacteria
atggaaaaaagaaaagagatatttgatattctcgacagcttcagaactcaggacgcagaggagggcgaaagagacagatactatcctgcaagcatatactgtcctgaatgtggcaaagacactactacaatagttaaatacgacgatgaaacaaagattgcggaatacgaatgtgcctgcggacacaagggaacatttgattttaaaacaaactacaactgcaagctggcgtggaaaatcgactgggcaatgagatgggtatacgagggtgttgacttcgaaccgggcggaaaagaccatgcaagtcccggcggaagctatgacacaagcaaggttatctgcaaaaaaatcttcaacagcgatgctccggaattccagggatatgagttcataggaattaaaggcgttgcaggcaagatgtcaggctcatcgggacttaatatgacacctgcaacactgcttcagttctatcagcctgaggttatactgtggctgtactcaagatgcgagccgaccaaggcatttgacttctgcttcgatgacggtatacttcgtcagtattttgaatttgacaagcagtacaatgaatacaaaaacggcacagccaatgagtttatgacagttgtaatggaaaactgtctgcacgagggaagcgatatcaagacagttccgatgtcacttctggcgcagctgggatcaatagttgacttcaacgtgcctatgatggaaactgtattcgagaagataaatcagccgtacaagtatgaggatttcaaggaaagacttaatcttgcaaaggcgtggcttgaaatatgcgcgcctgatcaggca

SEQ ID NO: 2541 - DNA, 903 bp, Unknown
  Unknown gut bacteria
atcgacagacctattgaaataggaaaactgcagagatacgcaatcgaacaggaagaaatcttcggaatgaagacacttgaagcaggcgaagcaaagcctggtaaggtggcatgcataggagcaggccctgcatcacttgcagcagcagcagagctgagaaaagcaggctatgccgtaacaatattcgaaaaagaggaaaaagcaggcggaatgcttacatacggaatcgtaccgtcaagacttcctcagagcgtaattgaccacgacgttgcaatggtagaggcaatgggcgttaagttcgaattcggaaagaaagtaacaatagcagacgtagacgactatgacgcagtattcgtaggaacaggtctgtggggaacaaagcttccggaaatcccaggaacagagttaaagggagtatatgcagcagcagattacctgaaagcggcaagaacaagcggcaaacaggaaggcaagaaagttgttgtaataggcggaggagacgtagcagttgactgcgcagtaacagcaaagcttcttggagcagaggatgtaagaatagtatacagaagaactctggaagaggctcctggcaacatgaatgaattccagtatgcattatcacttggaatcggaatgacaaccaatatggcacctgcagcaatcgagggagcaggcaaggtagaggcaatgacattcacaggaagagaaggaaagcttgacggatcagagttaaagcttgcatgtgatacagtggtatttgcaataggtcagaaagcagagcctgtagagggcgtagcagcaaacgaaaaaggcggcgtggcagcagaagaaggcaagacaaacgttgcaaaggtatttgcagccggagatatagtaaacggaggcaagacagtggtagaagcc

SEQ ID NO: 2542 - DNA, 1464 bp, Unknown
  Unknown gut bacteria
ggacagaccctcataattgcagcatctcctgtgagagcagcaagacttgcaggtgatctttctttttttattgacaaaaaaatatatgtgatgccgcaggaggaggaaacttttttcagatatgaggccaagaaccacgatgtgctggtggagcgcctgcggatattaaaagcgttatgttcaggggaagactgcatagtcatagcccctgctttggctgcggttaaaaagcttccgccgcgccgtatatatgaggaaaaggtgctgaaaatacaggtgggcacagagctggatacggcagaggtaaagaaacagctttctgatatgggctatgagagatacaacataattgatgcgcaggggcagtttgcggtgcgcggagatattatagacatatatacgcctgacggagcgcttccgtatcgtatagagctgtttggaaatgaagtggacgctatcagagcctttgaccccgatacacagaggtcattaaacaatatcgagtctgtggaaatatatcctgcaagccagtttgtaaacgacagagatatattcagccgggccgcggacaaaatccgaaaggaatacggcaggcagataaaaaaatacgataaggccggagaaacagacaaaaaagaaaaccttgaaaaaagactcggatatattacagagtatatagagaaggtaaacaacgttcagatgctggaaaactatctccactatttctatgacgatatgcagtatctgtgggactatatgacagacggcctgattatagccgatgaccccgacaggatttacgaggctcttgatttaagagatgcggagcgcagggaggatttcagagttctgcttgaaagagggcaggctgttccttatgactacaggatattttcacacaaggaggacctgtacagaatatatgagagagaaaatgtatatgtcctgactccttttgccaagaaaatcaaaggcattgaaacctttgcagagcttcacaatgtagtaagccgtcagccggtggtgtttaacggcaggctggatatgcttgttacggaacttaaatcctacatcaaaaaagactatgagataacgattgtctgctcatcttccgagcgtgtaaacaatatgagggagtttctttcaagagagggacttgaaagaaaggtatctgtaaagccgggcgagctgacctccggcattgacttccccgaaagccggaaggtatggatctcggatgcggatatatttaccggaagcagacacaaaaaaagaaaaaagagaataaagagtgagaacactcagcagataaaaagctttgccgacatcaaaaaaggcgactatatcgttcacgaaaatcacggtataggcaggtttatgggaattaagcagctgactgtaaacggtgagaaaaaagactacctgcatatcaaatatgccggagaggatatgctgtatgtacct

SEQ ID NO: 2543 - DNA, 492 bp, Unknown
  Unknown gut bacteria
atgagcaaagatttatatgtaattgcggaacagagagatggcgaaatcgctaaagtcactcttgaactgcttggcgaagcaacaatattagctgcagaccttggagaaaaagtgtatgcagttttaatgggagaccagataaaggataaggctcagtccctgatcgaagcaggtgctgacggagtaatcgtaattgaagatccaatgcttaaagaatatgtaacagaaccatatgctaaagcattaacagctatgattaagaaatatgatcctaacatcgtattattcggagctacatcaatcggtagagatatcgcaccaagagtagcagcaagagtacacacaggattaacagctgactgtacacaccttgacatcaacatgaacaagtacttcgaattcttaaaggctacatcaacagctgatacagattcaatcgaaaagaagcttggaatggacgatgtaacattaaagatgacaagacctgcattc

SEQ ID NO: 2544 - DNA, 1158 bp, Unknown
  Unknown gut bacteria
gtgaaatacaatatggaaatccttaaaaaagcatatgagataatcaatcagaagcaagatgagataataggaacgcttcagcagtttatagcaatcccaagcgtttccgtcagaacgccgggagataagccttttggcgaggatgtcgacagggctttcaaatttatgctggaaaaagccgaaaacgacggctttgaaacctttaatgcggataactatggcggacatatagacttcagaggcgaaagcggcgaggttatgggcattctgggtcatatagatgtagtgcctgagggcagggactgggactatgagccttacagcgccactgtttcagacggcagaatatacggcagaggagcgatagacgacaagggtcctgtaatagcgtcatactatgctatgaaagcactcaagtcagcaggatttaagccggacaaaaccgtaagacttattcttggtcttgatgaggaaaccgactgggagggtatggaatactattttacaaaggtaagaaagcctgattttggatttacccctgacggagagtttcctgcaatacacggcgagaaaggcattatagtatttgatatagcggacaaattcggcaaatcgcagacaaagggaatagagcttcgctctgtcaaaggcggcaacgctgccaatatggttgcagaccacgcgagagccatagtgctttcagaggataaggcagaatacgaaaaaataaaggaaatgcttgcagagcttcgcagacagaaaggctacagggtgacacagaagcagataggcaaaagccttgagattgccgttcagggcgtttcggctcacggagcaagaccggagcttggagtaaacgctgtttccgtaatgatggatatactgggacacataaactttgcaaatgatgatatgaactcattcatagacttctataacactcacataggctttgaaacagacggcaacagtatgggctgcggactttcagacgagccgtcgggcaggctggtattcaatgtgggtatgattgatatgagtcagaaatcagtgaaccttacaattaacatcagatacccggtaacctttgacgaggataaagtgtatgaggctatgatgcctgtaataaacagatacgatatgggtatcgtaaagggc

SEQ ID NO: 2545 - DNA, 525 bp, Unknown
  Unknown gut bacteria
atggacgatgccatatacgctacagaggcaggcaagatccatgctatagtagataggattgcagaggttcacgctacaggccagcctgtacttgtaggtactatatccatcgaaaaatcagagcttatctcaaagcttctcaaaaaaagaggcatcaagcacaacgtactgaacgcaaagcagcacgacaaggaagccgagatagtagcagaagccggaagatatgatatggttacaatagcaaccaatatggccggcagaggtacagatattatccttggcggaaaccctgagtttgaagccaagagagaaatggcaaagaggggctatgacagtgaaaccattgcctttgcaacaagctttgtgacaacagatgatcctgagcttctggaggcaagaaagcttttccacgagcttcacgaggatttcaaggatctgcgtaaggcagagcaggaaaaggtaagagagctgggcggactttgcatcataggtacggagcgtcacgagtcaagacgtatagacaat

SEQ ID NO: 2546 - DNA, 1185 bp, Unknown
  Unknown gut bacteria
ggcgcagaggaatggggttcaacagacgctcagtttgactggacaaccggcgcatggggaatgatccatacagaaaaacctgaatgggccaagaaaacaatagcaatgcttaactgcgagcttcctgcttttgagccacaggacaaaactcttagagtttcatgtgttcctgaatttgctacaatgagcaaaaagcttataagcgagtccggacttgttgcacagacagacataaaactggatgcagagtcagttgatgcaagcaatatggaagatggtgtatcctacagatggcacggcgtgccgtatatgttaaacggcttcttaggcgacaaatttatgtgccagagataccatactatagatgacgacaaagacacatggtcagaagaaacaatgctcggcaacctctactggttcggaacttatgcaatctatatcgacaagactcctgcgcttgagcttgatatgactcagacatgcgatcgtcttgaaaagaacctgaatgaggagcttgcaaaggatgctgatgttgatacagaaggctacaaggctgctcttgcagacatgaaggctgcagcagaagcttacaacaagaagattgctgacattaatgcggcttatgaaaaagcaatggcagcaggagatgatactgatgcaatcagagcagagggtaagaaattaaacaagcagacactcaaggtatttgctgaaatccagaaagcgtttatggaaacaagccctgatgatgttgcatacggacatcctacaatcaacaccaacgcggaagtcctgcagggagcaattgcagctcttgaaaaagaagaactgtacaatgacgacgaaacaggagctcttgatgtgctttacaacctgaacggtgttattgaatataactactatatattcggagtaaagcctgctactgatattatgcagatgtacgaccagaaatatatctcaacagataagacttactggggaacagatgcaatgccgccgattgtatatacaggtgaaacaactcacaagctggcaagagatgccgaagcagaaaatgacatagactacaaggcagtgacaaatgtatatgagagtgctcttgcagacactatgaagaacatcaagctgtatgctgacagagaagtcaaggatatggcaaaggttgcaaagctgatgaaataa

SEQ ID NO: 2547 - DNA, 1134 bp, Unknown
  Unknown gut bacteria
atgaaatcaacatttatttcaaaagagaaaaacgttgttaagttctcaatggaatttacagcagatgagttcgaaaaggctcagattgcggcatatcagaagactaaggatcagtttgcaattgacggcttcagaaaaggcaaggctccaagaagcatcatagagaagcactacggcgaaggtatattctttgacgaggcaatcaattcacttatgcaggaaaactaccctaaggctttagacgaattaaaccttgaggtaatagacagccctaagctttcattcgaagacattgcaaagagcaaggatcttatcattaacgttgaggttgaggtatatcctgatgtagaagttaaggactatctgggcgttgaaatagacaagattgaaaaagaagttacagacgaggatatagataacgaaatcaaaaatcttcagaagagaaactcaagaatggtactggttgacagacctgtacaggacggagacacagttcttcttgactatgccggatatgttggcgaagagcagtttgagggcggcacagcagagagatatccgctcaagataggttcaggcacattcattcctggatttgaagaacagatcgtaggagcaaaagcaggagacgatgttgacgttaaggttacattccctgaagaatatcacgcagagaacctggcaggcgctgaagcagtattcaagtgcaagatccacgaagttaaagaagaagaagttcctgaagttgacgatgaattcgtaaaagacgtaagcgaatgcgatacacttgatgaattcaaggctcagatcagagaaaacctcgaaaaggctgcaaaggcaaacgctgaaatggaaatgaaaaacgcagttttagaaaaggtatacgaagcaaatgacatagatgttccaaatgcaatggttgaagacgaaatcacaaatatgatgagagaatttgaccagcagctcagagcacagggtatgtcacttgagaaatacttcgaatatctgcagacaagcactgctgatttcagagaacaggtaagagacgaggcagcaaagaaagttaaaacaagaatgatagttcaggctatagcagagcaggaaaacattcaggcagacaaagaagatgttgac

SEQ ID NO: 2548 - DNA, 561 bp, Unknown
  Unknown gut bacteria
ttgtatccgccgatttttttaaggaggtacaaagccattagcagagaagtaaaggaaaccctcataaacgaggaaatccgctttaaggaattaagagttgtatcagatgacggacagcagcttggaattatgccaagagacgaggcgcttgccctttccgaggaaaaggacatggaccttgtatgcatagccccaaaggcagacccgccggtatgcaagattcttgattacggtaaatacagatatgagcttcagaaaaaagaaaaggaagcaaagaagaaccagaagaccacacaggtcaaggaaatccgtctcagcacctttatagaggagcacgacatcagaattaaagcaaagacagcgggcaagttcctaaaggacggggacaaggtaaaggtaagtcttcgcttcagaggcagagaggcagcctacaaggacaagggactcaaagtaatggagatctttgcggcagagcttgctgaaatcgccaacatagagaagaagccggtatttgagggcaggaacctgtcgatggtgctggtaccaaaaacagagaagtag

SEQ ID NO: 2549 - DNA, 696 bp, Unknown
  Unknown gut bacteria
gtgaacgaagtatacaggaaagaaaagaaatttttaataagccttgatgaatacatcaaaaagaggcatatgctgagtcaggttctcaaacctgatgcgcacagtgcagcggacggatatatgataagaaccctgtattttgatactgtttttgacgaggactttgacgacaagcttgcagggattgaaacaaggcgtaaaataagactgcgcatctatgatacggaatcggatttcgcaatgcttgagatgaaacagaagcagggagattcccagttaaaaaggtcccttcgcgtatcaaaagcagatgctgtcaggctttcgggcggggactattcaccgctgcttggatacggggatgtctttgcggcagagtgctacggccttatgaactataaatgctacagacccaaaacgatagtgcagtacaaccgatatgcctttgtggcaaaagaaaacaaaacgaggattacgtttgacagtaatattgaggcaaccgaaagctgctttgaccttttttcggacaggcttgatatgaatcccgtaatggacagatacaatgtgattttagaggttaaatacaacggatttctgctggaatatataagaagaatgataaacagcatcaaccgcagcgagatatctgcaagcaaatacgtgcttgcaagacagacagggtataagacgagattgtaa

SEQ ID NO: 2550 - DNA, 714 bp, Unknown
  Unknown gut bacteria
gagcttttaaacaaagagggaggcttcaacaaagaggcgtttgacgccaaggtaaacggacttcttgcaaagcaggactctcttgttatactgctcaacacaccggctcacaaccctacaggatactcgcttacactttccgactgggacaaagtaatcgaaacactttcatcagcaggcagcgacaaaaaaataactctgtttgttgatattgcatatatagattttgcaggtgatgaagaggaatacagacaattcctgcctaagcttgaggagcttcctgcaaacgtgcttcctgtacttggctacagcgcatcaaagactttcacactttacggaatgagatgcggagctatgatatgtatggcaaagacagcggaaattgcggctgaattcaaacaggtatgcgaattctctgcaagagctacatggtcaaacagcacaagagcagcccagaaagttatagctaacatatatgaggatgagaagctgcttgccagggtaaacgaagaaagaaaacagtacagagatatgctggttgcaagaggcagagcctttgaaaaatcagcaaaggaggcaggtcttgaaatcgtgccttttgactcgggtttcttcgcatcaataccttgccctaatcctgatgaaatcagcagaaagcttgaaaaagagggtattttcatagttcctcttgcaaagggcctgagagtgtcgggg

SEQ ID NO: 2551 - DNA, 828 bp, Unknown
  Unknown gut bacteria
atggctcagattatccagttagacttcaacaagacgaatagtgcctccggtgtcatcgacatcgcaaccgtccagcagagctgccgtaagctcaaggctggtctcatcgctcccgccaccgaggaggtgcacactgaccttgctgtcgagcacgctgctgagcccatcaagagtatggatgacatcatccgcatctcacagttcctcattggacagaagcgtttcagagacaatatgctgttcatcgttggtattaactttggacttcgtatcagcgaccttcgctctctgcgcttcacccacatcatcaatgatgattgcacctttcgtgaccggttccccattctggaaaagaagacccggaacacacgcaagcatcagcgcaaccgctacatcaccattaacaccgcagttgtcgaagctgtcaccatgtaccttgagaacactccaaacgttcgcctcagtgactatatgttccgcagccagtccaataatggagtaaacgagaataagcccatcagcaaacaagccgttgactcaatgctcaaaggcattgctcgtgaccttggacttggtaaccgtatggcaactcactcattgcgtaagacctttgcttatcatcagatggtgatgagtggtaatgaccctcgcaagctcctgcttctccagaagatgttcggtcactcgaccgctgctcagactctggactacatcggtatcaccggcgaagaaattgatgaagcataccggagcctcaatctcggtagcatcaaccacaactatctggtcgatagcgacattggagaaagcgagtctctgatggcataa

SEQ ID NO: 2552 - DNA, 747 bp, Unknown
  Unknown gut bacteria
caggagataaacgaagaaaccagaacagaatatacatatggactgcagatgagaaaggaactgagcatgatttatgtcactggagatacacacgcaaacattgatattgccaagcttaatacaacaaagttcccacaacaaaaggaattgacgaagaatgatttcgtaatcatatgtggcgattttggactctgctgggacggttcgcatcgagagatgtggtggcaagactggctgacagcgaaaaacttcacgacactttggattgatggcaaccatgagaactttgatatgctctaccagttcccgctgattgacaaatttggcggaaaggtgcgtgaaatcgctcctgacatctatcatctggacagagggcaggtgctcacgattgatggaaagaaaatcttctgcatgggcggtgctcgctctgttgatagagagtatcgcgtggaacatatctcatggtggaaagaggaaatgccgtccagagaagaaatggaacgagcgattgcagcgctcgaacaaaatcattggtgggttgactatgtaattacacattgtgcgccaaggagtgttcagactctgctcgcaagctggtacgagaacgacccgatggtcagctttttagatagggtttgttccgacctcacattcaagcggtggttctttggacattatcatgtggacaagcaggtcaatgagcagtttattgctctgtataataaagtaatcccgatggagtggtaa

SEQ ID NO: 2553 - DNA, 501 bp, Unknown
  Unknown gut bacteria
atggaaacaatgagtatcttagataactttgatgtggttggcgtccctcgtacattcagtattgcagaggttcgaatcctgaagaaccgcatctcctttaaccttgcaacggcttctgagattggctatccgccatttgtgcggctgttcatcagcagagacaaaacacaaattgcattgcagccttgtgccaaagaaacaccgaacgcgatgaagttctttacgtcggattctatgaaagacggaaagcccaagaagaggatgattccggttggaaatcgtgcgctgacggcacttgtaaaagccggtattggtgtcgagatgaatgttccgttaaaggcgccgggtgttcgcttcgcagatgaaggcgtcatcatcttcgacctcaaacaagcaactgacatgaaccaaccaaatgcttgcacagaaactggtctgtgcctgattcccactccggcatatccatttgttgagatgccgtctggatacttcgcatcataa

SEQ ID NO: 2554 - DNA, 189 bp, Unknown
  Unknown gut bacteria
gtgattgcaattaccgcctcagaaaaagaagccattcgtgagaagtttcctcgtgttcatatcgttcgcacgatgaagcaagattccaaacggcaccactactacatggttgaggatggcgctcctatgaagctgctccgcagtttgcgtggactggagcgtgttcacgacaaacgaaagggagtgtaa

SEQ ID NO: 2555 - DNA, 546 bp, Unknown
  Unknown gut bacteria
tacggagtatatcttgacgaagcagtaagacttttcatcaggaggtcaatcatgcttgagttctgtggaagaaagttcacttgtgatgaatgcccaatttgtgaaggcattgagcataggctcagggttgcaagagaaggtggctacgaaccgcagcttgaatactgcggttgcgataaagtccagactgagttttttatcagtggttattgcagtgatgcttttgaggcggacaagccgcagggcaaactgtgtgaaccgagaaaaaccgggagagcatatcggcgcaagatgcgcaaacagaagaaagaaaagctgatgcgtattatgacctacggatataagtcaggtatcggctatacatattggggctggaaatacggcgtttatcagccggtcggaagttacatccagtaccccaagaactcaaacaggcagacgttttggaaggcatattccaatagaaaaatcagacgctataagggcgacgttcgtaaaggaaattcgtaccggagacatttcgattatgcgtgggaggttgactaa

SEQ ID NO: 2556 - DNA, 591 bp, Unknown
  Unknown gut bacteria
atgcaagaacaaagcaataaacagttctacatttcagattggcattatggtcatgcaaacgtgattgcctttgataatcgtccgttcaaatcgcttctggagatggacgaggcgctggttgaccgttggaatgccgtggtttctccgggcaacatcgtgtatgttcttggggatatgttctggtgtaaggcacaagatgctatccccattttgcgttccttaaaaggacagaagtttctgattaaaggaaaccatgaccggtgcaatgacaacaagttcttgcgggagtttgttaaggtcacagagtatctcgaagtgaaggacaacggtcgaacagtgattctttgccattacccaattccgtgctttaagaatcacttttacggttcctttcacttgtatggacacgtccacaattctttcgagtggaacatgatggagcatgacaagtatcaaatggaggaactgtacacgacaccttgccagatgtttaatgtcggagcaatgatgccgtggatggactacacacctcggacgcttgatgaaatcattgcagcaaattcgcataacgaggctgttagaaataaatga

SEQ ID NO: 2557 - DNA, 312 bp, Unknown
  Unknown gut bacteria
atggatattaaaagggtcgatttgattcaacagcttgtggacaagcatggttatacgaagaaagccgcgacaagtatcgttgatgatttcactgacattattctttacaatctcggaaacggagacaccgtttccattcataatttcggttgctttgacatcttagagcgcaaagctcgcagttgtccgaacccgcagactggcgaaaaggtcaatgtacctgcgcattggattccccggttttaccccggcaacaaaatgcgcttggctgtcaagctgtgggaagatagtaccaaaagggggctgaggtaa

SEQ ID NO: 2558 - DNA, 213 bp, Unknown
  Unknown gut bacteria
atgaatatgaactcccataaggaacctccttatatatttgactttggtactcccgacgaggctcgaactcgtgaccccagcattaaaagtgccgtgctctaccaactgagctacggaagtatattaaccggctattacggtatgcccagaaaggtggacacgcttgagttccacaaacagttttgcccgcaaaagatggaggtgaatatttga

SEQ ID NO: 2559 - DNA, 627 bp, Unknown
  Unknown gut bacteria
ggaactgtgcgcaatatggctgtcattaactccgacaaccttaatctgaaagcactgtgcacgatgcccggagaagatttgccgcacggcggtctggtcgaatggatgggcaatcactggctgattaccgagaaagatgccaataacgaactgtacacgaaaggcatgatgaagcagtgcaactacctgcttcgttggattgcggaagacgacaccgtcgttgaacggtggtgtgtcattgaggatggcacgaaatatctgaccggtgaatacggcgacaacgattttattgttgtgcgcggtgattcacgaatttcactaacacttgctaaggacgagtattccattcagttaaatcgtaacaatcgctttttgattgatgactatgattcgaagaacgtccttgcttatcgtctcaccaaaccgtttaagctcggtggaagctataacggagagggcgtccttaacttcgttcttacggagtgcaatacggaagacagcgataacatcgaacttcatattgcaaactactatgaccatttcccgaaagagaaaccggacgagccagatactccatccggtgacaatacgccagatgtacctgatggaaagaaggtgtggttctga

SEQ ID NO: 2560 - DNA, 417 bp, Unknown
  Unknown gut bacteria
tcgaaaagattttacgaatatgatgagggagtattcgtacaatcacggggatttaacggacttgcacttatgatgattcagaccacggttggcgtgccgatggacgctatggtcttgaataattatttccgcaccctcatcaatcttttctttaagattcttcctatcaaggaaagcggagaaagttcattggatacctatatgagaagtcttcaggcggagttgcttggttgtaaggagctcattgaggcaatccacgaagaccccttgttcctgtctttgattgccatcctgcaatacctcatcgataatccatcttgcgaagtttcggtggtaaagcgtgaggtgttccgtgcaatttcaatttgcaataaattgaaatcacgatatgccgtgccgcaggaggtgtcaaaatga

SEQ ID NO: 2561 - DNA, 1083 bp, Unknown
  Unknown gut bacteria
ttggaaacaaataaacaaaatgagatacgcaatgcttatgagcatagcgcacaagtccagtgtattcccgcttcgattaaaaagactactgagcacagcgaagaagacccattggtggtcgcgccgtattgcagagtcagtacggacaacaaagaccagctcgcaagctacgagctgcagtgccagtattacaaagaatatgtgtcgaagcatccggggtggcggctttatgacatctacgccgatgaagggatttctgggacttccgtaaagaaacgcacggacttcttacggatgattgatgattgtaaagcaggcaaaatcgacatgattatcgtgaagaacattgcaaggttcgcacgaaatgttgttgactgcgttgccactgtgcgtatgctcaaggcactggacaagccggttgctgtttattttgaggatattgcaatcaataccttgacacagaccggcgagcttctgatggtcgttatggctgctattgcgcaaggcgagtcagaagcaaagtctgagagcgtgaaatgggggttccagaaaagatttgagaaggggctcccaaagctcgcagacctctatgggtacaccagagataagaggctgctggagatttacgaacctgaagcgaatgttgtgcggctgatttatcaaatgttctacgatgacaaaacgattcctgaaatctgctacatcttaaaccagcaaggtattccatccccacgaggtggtcagtggacatactctacggtaaagacaatcttgacaaatgagaaatattccggtgacgttttgatgcagaagaccgttaccgtggatatcttttcgcatcgctctattcggaacgacggacgtgctaaccagttttttatccaaggctatcacgaagcgattattccgagagaactttggcttgaggtgcaacagattctaaagggcgaaaatgtcgttccggttccatcagttgatgaggtggcagatttgtctgcatctgatgtccctcggatattggatggcttttttgtaattaaacctcgaaaggatggaaacaatgagtatcttagacaactttga

SEQ ID NO: 2562 - DNA, 510 bp, Unknown
  Unknown gut bacteria
atgcaactggaagagtttttcgattataagaaccaactgatgaatgacctcttgacgaacgaggaaatcgtgcggctccttgccgatgactgcaaaccagtcaacgatgttcaagacctcgtttataagcaggtatttccatatgagtacattccagaaaccattgagcacgggcagacctttatctgctgcgatgttgacatccaaaagtctgtaaataagacttttctgattccggttttatatatctgggtctttagccacaagagcaagctcagattaccaaaagaaaccggcggtgggattcgtactgataaactgtgttccgagattgcaaaggctgttaatggcagtcgatactacggtctcggtgagttggatttatacgctgtgaaacgttttgctccaatcacagattatcaggggaaagtcctcacgttccaagcaaaagacttcaatcggacattaccggccggcaagccagttccctccaacaggaaaaatggataa

SEQ ID NO: 2563 - DNA, 1542 bp, Unknown
  Unknown gut bacteria
atgagcgagagaaccatgagaatcgtgttctcttctggtatcagcaatttagttgagaagaattcctcttttgatagtggcgtccttcgtgttgcttatactggcaagaatcgcaacaacagcttcatcagcaaggaaacctatgagcgctgtatccagagcatttataactgccccattgtgtgtaactatgacagagagactgacacaattgggtcgcacgatatagagcttgtatccacagatgacggcggcatgaaaattgtcaacgttactcagccggtcggcgttatcccagagagcgccaagtattggtgggaggaaatcgaagacaattctggtgtccatgagtatttgtgtgtagacgctttaatctggaaacgccaagaggcgtatagaaaaatcaaagatgatggcattacagacgagtcaatggaaatctccatcaaagaaggagaaatggttgacgggatgtacgtcatcaaacgatttgaattcacagcgttttgcctgctggggacagcagagccctgctttgagtcagcgtcgttggagatgttctcatgtgacggtttcaaacaacagcttgctgagatgatgcaggaattcaaggaaacatttactacagcacaaccctcgaaagaggttggcatacacccacaaaattattcggaaggaggagaagaggtattggaacagaaagttgcactgatggcagagttcggtctgactaccgagatgcttgatttcaatatcgatgatttcagtgttgaagaactgcgcgaaaagtttgaagcgctgaagaccactggtagtgagcctgccgcaaatgcaggtaaccctgagagcttcgctctggaaggacagttccgcgatgaactgtttggggctttggagtcagaaaaggtcgaaacctgctggggaatggattcccactattggttctgggattatgacagagatgcgtccgaagtgtacgcaaccgatgtcacggactggaatctgtatggattcccttattcaatggatggcgaccatgtcgttattgactttgctggcaagaaacggatgaagctgtctcttgttccgtttgacgagggcggtcaagccgaccctatcagcggaatgtttgcaaagattactgaaaagtattctgcaaacgatacgcagtgggctgaaaagtaccagaccgcctccgacacgatttcgtctatggagaacgcgcttggcactttgcgccagtttaagacatatcccgaagatgccgctgcaaagggcgaacgggaaaaggtcttcgctcagttcgaagacttggttggcgtcgaggcgtttgaaaacctgcgtgaacattgcactgagtatgcggtcgatgttcttgaggagaaatgttatgcaatccgtggcagaaacggaactgctgcaaaattctctgtcgagcccaagagtcccaagctggtagttgagaagaccagcgtaacgccggagccctatggtggtgttttcaccgaatacggaattgcttcgcgcaatcaacataattaa

SEQ ID NO: 2564 - DNA, 273 bp, Unknown
  Unknown gut bacteria
atgagccgtaatgacggcgaaacggtggtatctgaaccaccgtctgcggatatccgacaattcgctaaaggagtttttcatatgtcctatgatgttttcaaagaacgggtgagagggcttgtaaatcgctccggttccaaagtgagttttcaccatgaggacggaaagcacatcgcccgttgctctgatggcattaccatcattggtaatgtgctttgtccgagggttcttgttaaatggggcagcggtcataccgcttatgccacaatctga

SEQ ID NO: 2565 - DNA, 450 bp, Unknown
  Unknown gut bacteria
atgagcgttccatatgatgtgttcacggatgcgttcttatcgaaaatcacagagtacgactttgtcaatatgcgtgactttgaaaggaacggtctgattgacggttacatgaaacgggcaattgcgtccttccgaaagatttgcaagtatgacctatccacaaccggcgatgacatcattcgagagtttgatgtgaacatccccgatgaagatttggatgagattgcagacatcgtttctgaaggtatgcttgttcagtggatgaaaccttatacatacaagcaggaaagtctggaaagtgttttgaacacgaaagactttaccacctattctcccgcagagttgctcatgcgtatcggcaacgcatatgcagccgctcgaaaagattttacgaatatgatgagggagtattcgtacaatcacggggatttaacggacttgcacttatga

SEQ ID NO: 2566 - DNA, 471 bp, Unknown
  Unknown gut bacteria
ctgttaggaggcgctatggagcggagcaagtttaacgtagataaagataaagaaaaacgaacttacaacaatatcgtattcgacagccagcttgaaatgaaatactacagggatgtactttgtcccgcagtggaaagcggcgaagtaacttattttgagttacagaaaaaatatgagctgcaaccgaagtacactcacaatggtaagacggtcttgccaatcatttatgttgctgatttttatatggaatatgccgatgggcacattgaagtagtagacacgaaggggtgccctgatagtgtggcaaagctaaaacgaaaactgttttggtacatatacgcagacattgactataagtggattacttatgttcaaaagtggggcggttggcttgagtacgaagtagtaaaagaattgcgcaaagaagcaaaacgcagcaagaacaaaaaggaggaacccgataatggctaa

SEQ ID NO: 2567 - DNA, 312 bp, Unknown
  Unknown gut bacteria
atgattatggatttgtggaagggatatgagctaagcagaacatatgtcccagcggcttattacacgattacatcgattaagagcaaaaacggcatagcaaatccattgcatgacgaggtgctcggtcgaaaggcatacgttgttcacttggaggtcggagagcgtggctttatcaagtatttgcccgattatgacgaccggtatcattgcctacatacatctactgttttggattttactccgtggggaaacggcgaagacacaattaccatccaaacagcaaatacggagtacatcttgacgaagcagtaa

SEQ ID NO: 2568 - DNA, 273 bp, Unknown
  Unknown gut bacteria
atggatgtaggcaacgaccgctttgtagatttgctgttatacatatttctctcagcagcttttcgccaaaggcaaaagcaagaattcggcactatgctcgtaaaccagaagcccgctacgcgggcggtttttcttttactcactcgcattgcaagcaacgctcgtgagttctggtttacgaccaatgcccatgcacatcggttgagggatttagagaaacgaccgatgcggaaagcggttacaaacaatgttgtgggaggtggtgaagaatga

SEQ ID NO: 2569 - DNA, 321 bp, Unknown
  Unknown gut bacteria
atgaacccttggaacacataccgttccagaatcaatgctcacggcatcacaaagcgcgactctgttttgcagcgagaacgagcgtttttaagcgcgaagctccctgcaagcctttcgtatcaccaattgaccgtaaacggaactgtacgcaatatggctgtcattaactccgacaaccttaatctgaaaacactgtgtacgatgcccggagaagatttgccgcacggcggtctggtcgaatggatgggcaatcactggctgattaccgagaaagatgccaataacgaactgtacacgaagggtacgatgaagcagtgcaac

SEQ ID NO: 2570 - DNA, 1755 bp, Unknown
  Unknown gut bacteria
atggcgtcaccaaatcaaagcagacgctctcgtgttatcgagggcatggcgatttggggcagctattaccgcgagaacatcgacatctttgtcgaagagtatttgcaacttgattttctgaaatggttccagactgctcttcttgtaatgatggacaggagtcgaacgttcctgtggattgctgcccgaggaatgggtaaatcattccttattgccattttcgtagtcattcgctgcatcttataccccggcacaaaagtcgtcattacatctggcacacgcggtcagagtattaacgtgctggaaaagattcaaacagaactgatgcctgtatccccaaatcttagaaatgagatagatatgggcgacacaaagttttctgggcaggacgcaaaaataatgttcaagaactccagttatatcaaggtcgttacggcttcagataacgctcgaagcaaccgtgcgaacatcttgattgtggacgagttcagaatggttaagaaagataccattgacaccgtcttgaaaaagttcctgacaagtcgtcgtatgcctccatacagagatttgaccccggctgagcgtaaagctgagtacgctaaagagccgaacaaatcctgtttcttatcctctgcttacttcaaagaccattggtcatacaacaaaatgctggacacatttaagctgatgcttgatgattctaagacagattttgtgtgcggcttcccatatcaactctccatccaagaggggcttcttttccccgaagacgttgaaagcgatatgctcgaaagcgactttaatgaaatcaaatggagcatggaaatggaagccatgtggtttggtgcagaggacggctcattctttgattttgactccatatcaaagaaccgccgtatcagttatccgatgctaccggataagctgtccgcacttattggcaatagccagaaggtaaaaattccaccaaaacaaaacggggaacgccgtattttgtctgcggatattgctctgatgagcagtaaaaagcataataacgacgcctccgccgtgttcatcaaccaaatgctaccgaccaaaactggacgctttatgagtaacattgtgtacggcgacacctttgaaggtatgcacaccgaagaccaagctttggtgatacgcaaattgtacgatgagtattcttgcgactacattgtgcttgactgtacaggtcttggtcttggtgtttacgacgctctcgtccgagacatggttgacccagacactggagaagtttaccccgcattatcctgttgcaacaatcaggaaatggctgacagatgcacaactaaaggtgccgacaaggtcatttgggcaatcaagggctctccaatattgaactctgaatgcgcggtgcttttgcgtgagggtttccgtagtagcaaaattcggttactcatcactgagtatgacggtgaagcgcttctgtctgacattaagggatacaactccctttcaccgctggaaaaggtgatgcttcagaagccatatgtacacacgaccttgttgattgatgagcttgtcaagctccaacacgaggagtccggtggtcgtgttcgagtctatgaaaagtctgggatgcgcaaagaccgttattccagcttgagctataactactatgttgccctgcagcttgaaagcaaatatgggcgcacaaaaacggcagactttaatgcgaatgatatattcatgtttaagcctccgaaactcaaataa

SEQ ID NO: 2571 - DNA, 216 bp, Unknown
  Unknown gut bacteria
ttgactggattaacactacaaaccaaggaggatacccgattgaataaacgataccaccgaccgctgccagaggattatctcgtggaggagcgtgttccatatacatacgaagatgccgacctgctaaatgacgatgaagccctcgaacggttcattgagagcgagcggtttgcattccgcgaggaatggttccgttatgtagaagagaacgagtaa

SEQ ID NO: 2572 - DNA, 1491 bp, Unknown
  Unknown gut bacteria
atgattacatacaatccactcctgtgtctggacttctataagacttgtcacgctgaacagtatccgaagggattgaccaagatggtctcctactacacgccgcgcatgagtcgccttagtgataccgataaggttacactgtttgggcttcaggcattcattcaggaatatctcattgaggcattcaacgaccacttctttaatgtcccgtttgatagtgtactcaaggagtacaccagagttcttggggcaacaattagaacgaaaggcgttggagagaaacggcttcgtgaattgcatgacctcggctatcttccgttacagattcgtgctgttcccgaaggaacgagaaccaatatcaaagtcccacaaattgaaatctcaaatacacaccctaacttcgtatggctggtcaacaccatcgagacgatgctctcttgcacaatgtggcatacgcaagtctccgctgaggttgggtacagatatcgtaaaatcgtcaatgagtatgcagaacgcacttgcgatgacagtgtggttcgtgcgagactccttggcgatttttctatgcgcgggcaagagagcgttgaaagtgcaacaaagagcgcagcggctttctgcctgagcttcttgaatacggcgacagttcctgcgattttgtggcttgagcataattacaactgtgattgtagcaaggaacctgtcgcatatggtgcgctctcaacagaacacagcgtaatgtgttccaactttgctgttgacggtgatgaggtgacacagattcgacgacttctttgtgaggtgtatccgcatcaaagtttctcaatggttagcgacagctatgactattggaatcttgttgaaaaagtcctccctcagcttaaagatgacatcctaaatcacgatggcttcatctcaattcgcggcgacagtggtgaccctgttagtgtaatcactgagaccgtatatcgtctgtgggacatctttggcggcacagtaaatagcaaggggtacaaggtgctgaatccgcacgtcaaggcaatttacggggacagcattactccgcagcgctgtgagcaaatctattctcttttggcgaaaaacggctttgcaatcaataatgtttcgctcggtgtcggttcattctcaatggagtgcttagagacaatcgagagcgatggaagcaaacagtacaatccgtacacaagggatacattcggcattgcagttaaagcgacatatgcagaagatgccgacggcaaaccgattatgattttcaagaaccccaaaacagacacaggacattttaagaagtctcagcgtggttgctgccgcgtagtcaaaactggtgacggctacgattacgttgatggtcttacttgggctgaagcacaggacagcaatgagctgcgcaccgtgtttagagatggaaagtttgaaaagcagttcacgctggatgaggttcgtaagaatcttcacggaggaacgttctga

SEQ ID NO: 2573 - DNA, 807 bp, Unknown
  Unknown gut bacteria
atggacacgaccgttggtgctctcaaagtaggtgcacaactcgtgatgggcaagtacggtgtggacaaagacaacccgtacccgattgtttggctgaaaggaaatccaaactgtgattttatcacagaaaaagctatcgactacctgtgcttcgatgcggcggaagagactgggcattataggcgtgttaataatgcgaagtatccagtgtcaaatctgttttcgttcttgaacagtgaccagatgatgtggtatcacgcaatgcacgataatgattcttcgcccggtgcctttgtgaggtatagttatgctcgctatgaagaccattacgggtttctgtatttctttgaagaccacgagattgcttctttggttaggaaagagtatgtggtcggagagaaccgagtgtcttcgttgattcgcctaccatcaattgcagacatttttagcctccaagatgggcggcgctttgacttattcaaaagaaaaggcattcgtccgaatccgacagccgacttgttcgacctgaaagctcgttatgcagggcttgattcagaccgtggatttatgagcttttggctgttagacgatgttgagaccgaaagagcggcgatttcgaatcgttctggtgtgttaaacaagctgacagcatcaagctgttccggggtaagaccggtgtgcacgttgagccctgacacgattgtcgaacaacgagaggacggcgtgtttttcatcaagccattcacaactcaaaatgtctttacggacgaagaactgtttgaattattaggtatggcgcagccttaa

SEQ ID NO: 2574 - DNA, 675 bp, Unknown
  Unknown gut bacteria
atgggaaaagtaattgttcaagattatacatacaaaaagccaatcacgatgattggtgtagaggctggtatctgctggggagcaaataccagtaatgatgagaagaattatctcagaggcattgactgtcttgagagcggacatgggagaacatttgagttccctgatgtgtatttgactcttgaagggtattcggcacgggtcgtccgtgagtggtacacccatatcggcggtctgcccacacgccttcaggcgagtacgcgatatatcgactatgaacatggttttggatatgttacgccgccaagcatcgaaggcaatccagaagcgaaagaagtctatgaagatttgatggaacatatcaaatcatacttagagagcctcgacactattggtgttcctcgtgaggactcagcattagggcttccgcttggcatggagacgaaaattgtgtgtaagcacaatatgcgtaacctgatagatatgtcgcatcagagaatgtgcaatcgagcctaccatgaatatagggggctattcaacgatgtatgcgatgctttggggaactattcggaggaatggaaatacatcgtagaccactacttcatgcccaaatgcaagctcatgggtttttgctcagagaaaaagacctgcggtatgatgccgcgcaaacaatga

SEQ ID NO: 2575 - DNA, 717 bp, Unknown
  Unknown gut bacteria
atgccgacacgtcatttactgtatcaaaaagactacccaataaatgactatattcgggttatgattccgactgttggtgaagtattggaaaacgaggataactactacagcatggtgtcaatgctcactgctatgcccatagatatgatggtacagcttgatgatatcgggattgatttcacaaccattaacgagtgggagctttttctcctcttgtttaactccttaaaagaacaggacacctcactaatttttggagactttgacctaaagccattccaacctgcaatcaatccgcaaaatggaaatgtgattctggttaacaaggcaaccggtgtacgaatcgaccgtgctctgcacgggcagattgccgtggctcttaggaaaatccaccaccttgaaaaggataatcgcaagccagcaaacggcgaagcgagagaatatatgattgagcgtatgcgaaagaagctgcgtcgtaggggtatgcgaacaaccgactctcagcttgaagagttgattgtcgcccttgttaacacagaacagtaccactatggatttgaggggacacgagaactctctatctatcagttcaatgagagcgtgcgccaagtaatcaagaaaattgactatgacaacaagatgcacggcatctatgctggcacggtcagcgcgaaagacctaagccaagatgatttgaattggctaactcacaaatag

SEQ ID NO: 2576 - DNA, 453 bp, Unknown
  Unknown gut bacteria
atgacgacaaccgaccgagacctgcttaaatctggaggtcttatgaaaagcaagatactgaaccccaaacgtatgaaacaactcatcgacttcaaagggcttgaacttgataacgggatataccccacagatatcgatgggttaattgagtatcacgactcagaatacatactcctcgaagtaaaacacaaggatgcaagagtcccatacgggcaacgacttgctatccaaagaatggtcgatgactttacaaaggctggtaagaaggcagtcgcaattgtttgtgaacacaaagtagatgatacagacaaacctgtggttgcggcattttgcaaggtcagagagctgtattacggcggtgaacacaagtggcgaccgccagattcgccaatgaatgttcggcaagccatagataaattccgaaagtatgcaaagcaacacaaaggaggttga

SEQ ID NO: 2577 - DNA, 408 bp, Unknown
  Unknown gut bacteria
atgaatacaacctactttctgaattgtgcggcaggcaatattttcaacacgaaaacgtctcctgctctgccaaagacctattacattggcttgagcaccagcgcccctgctatcaatggtactggtgtaaacgagccgtccacagatgctggctatgctcgtgtgaagttgagttcccttggtgagccggttgacggcgttgtcaccaacagtcaggctattaacttcaatgaatcaactgcgagctggggcacgattacccatttcgttatttacgattccgccactgttggcgaaggcaatctcctgatgtatggtacgctctctacaccgcgtagcgttgagactgcaaccattatgactatcaaggaaggctatctgtctctgtctgctcagaatcccacctga

SEQ ID NO: 2578 - DNA, 204 bp, Unknown
  Unknown gut bacteria
aaaaaaacattactgactacgattgctggtgaggcgatggacatggtttttcgtgcaattctgtttgcactggcaacagcagcagtcattggcggtcttgcatattggttgaagtgtctttgcctgtgcgactatgaaaatgcttgtgactattcgcagtgcgatagttgtccgttcccttgtgagaggcataattgtgagtaa

SEQ ID NO: 2579 - DNA, 456 bp, Unknown
  Unknown gut bacteria
atgccaagagcagtagaagatttgacaggaatggagtttggtaatggcatggtaaaggtaatttctcgtgctgataacggaaataccagacatgccaagtggctatgccaatgcgagtgcggaaaaatatttgttgaatatgcgctcaacttaaaggctggacgaagaaattcttgtggttgtttgagcaagcgaaaaccaacagactctattagtttacacagactaaatcgcagcggagacgacccgtggcataatttggcaaatgccattgttgcagttgcagcggatgattatcgttcagcacttcgtaatgaagacgagggattgctaaaaagtctggaaaggttcttccattctgaatggtacaggattctgacagacgttgacgcagacaggcttctcggaatgttgcgaagagaacagagcggctcattacaagccgcttacatataa

SEQ ID NO: 2580 - DNA, 7116 bp, Unknown
  Unknown gut bacteria
atggcaatggacgcagatgtacggttactaattggagttgcccgtggcggtgcagatggtgacagcgaagctcttatccgcaaagaactcaacgaaatcatgggtaaaatcaagctcgaagccaaactggatagtaaatcattcggtgagcaaatccgcaaacagcttgatgcaattagtaagaacggcaaattttatgtcaacttgtcaaagattaacatcggtgccggtgccattgctgattttagacgccagctaaacaccgtcatcaatactctcaaccttgataaagggacaagcattacgctgactgcagaaggtattggagaggttaagagtaagataaaagaaaccgcaacagtaacagatgaagccgccagaaagatggcggagttcaacgttcagattgctgcaatgaaaaagcaatccaagaacattgatactggtcttgggtctttgagcaagggagcaactgcagaagaggctgctcaggttactgcactgcttgagagatataaggcgtggcaggttgagtttgagacacttcgtctccaaggtgtcgatggtagcaatgagcgccgaaaggcgcttgaagatgaagcggctgcaatccttgtaaacatccaacgaatcaatgaagaacgagaggctactgccgaagcagcgcaggcaaaggttcaagcagaacgtgaagcaaaggctgcggatgatgcaacagtaacggctgaaaacaggaaaaacgccgctatgaaacagggtgttatgcttcttacgcaaatgcaaaaagcggagcaggattggactgctgcgcaaagcggacggagcagcgaacactataataacattcggcagggtaccgtgtacctgcaagaatatcttggtcagcttgagcgtggagaaatttctgttgatgaattccaacgcaggcttgctggtttgcggacatcttttgctgagtcatcaaatgccattaagagtgccggtgaaaatactaagacactgagcgagcgtgttggtggtcttgctgccaagtttacgtcatggcttactgtttctcagattgttatgaaactctattcttccttaaagaagatggtttctgctgttattgacattgatacagcgatgactgagctgaagaaagtcacagatgaaacgagcaccgtatatgctaaatatctcgatgatgcatctgttcgtgcgaaaaagctcggtgcaacaattgctgatacagttacagcgtctgctgattttgctcgccttggctatacactggacgaagctgcacaattagctgacgcggcattggtgtataaaaacgttggcgatggcattgaggatgttagccaagcatccgaaagtattatttcaacaatgaaggcatttggcattgaggctgaaaatgctataagcattgttgataaattcaacgaggtcggtaacaattttgccatttcctcagagggcgttggcgaggcgttgcggcgttcagcctctgcgcttgctgccggtaataatactctggacgagagtatcgctctcattactgctgcgaacagtgttgttcaagatgctgacgttgtcggtacgacaatgaagacggtctccatgtacctccgcgcagcaaagaccgaggcagaagaagctggagagagtacggagggtatggcgaatagcgtgtcagagctccgcgaggaacttctggcgctcacaaatggtaaggttgatattcagattgacgagaacactttcaaatctacttatcagattatgaaagagttggcggatgtctggggcgagcttaccgatatcacacaagcaaatattttggaacagattggtggcaaacgaaacgccaacgttgtttcatcaatgcttgagaacttcaacgtagctgaagatgtcgttaaaacagcggcaaattctgctggctctgcgttgaaagaaaacgaaaaatatcttgacagcatcaacggtaagattgctgaattcaaggcaacgtttgaagagctgtctatgaccctcattgactctgattttgtaaagcaggtcatcgagtttggtactgggctgcttgatgtacttaatgtgctggcaaaggtgattgataaagttggtggattgaataccgttttgtatgttacagtcggtatccttgccacgattaaagctgatgccataaagactttccttgttacaacaatccccagtgcactggcgaaggtgacttccgccgtttcaacctttgttactgggtttaagcaactcccggctgttatcaaggcgatgaatagtcagactgcgcttgcaatccccggaacgtctcgcctatctgtcgcgctaaaaacacttggcatttcagcgtctaccgctcagattgcggtcgctggtattgccgcagccataggcgcaattcttttaatcaaaaacgctatcgaggatgctcgtaccaagcggattgaagaagctgcgtctacaatcgcaagcacagaagcgaccattgaaaatgcagatgcagtgaaggctgcatatattgagtacgagaagtacgcaaatcgcacagaccttactgaaagcgaagaagcatcctttaagaccgcccttgacaaggtaaccagtgctcttggagataaagctgttgcgttggagggtttgacgcagggcaccaaagattataccgaggcattagatggtgccattaagaaagaacttgaagaggctcaacttgcagcaaaagaaaaacgtgtggctgctgagaagaaacttcaaagtgaaacttggtctggttgggatggttccaaaatttcttataacatccaagatgcgtggacggatgaggaatatgttaaagcaaaagaagctgcgcagaagattgccagtgactatttgcgtgaaaaggtttcgtctgttggttatggtttagctgcaacagagttggtgttagaaccggttgattggaatgttgaccattctaacatggatgccgttgttgactactattatacgctgcttgacctcaaggcagagttgctccggcaagacttaactggcaatgaaatctatgatgcagtaattgaaaagaccggattgctcaaagattctgttgatacatatgtccaatccatctatgacgagacatcagcgacctacgttcttcagaatggtatcccgacaacggttgaagagcttgaaaagtttagaacatatcttaatcaaacgattggtgatatgttcaactttgacgatggaagcgattcgttgtccgaccttatcaatggttggctctcggatagtggtttctctgacctcttagcgcaagcggcagaaaccgctgcatcggaagacccatttactccatatacagcaaagctcgaaaaattaactgacacggtatcaacactaaaagccgcctatgacgcattagatgcagctcaggcagatatggctactggtgcaggtttgtcaactgacactatcgaggcacttgcctctgccaacgatgactacctcagctatctgtatgaggaaaacggtgttattaaacttaacactgaggcttggatggaaaacgccaatgccaagatgcaagaacagatggctgaaattgagaaggagactgaatccctcaaggagcaaaacgctgcccttgaagagaagaatcgccttcttgacgaacaggcaaagagcggcgaagattactatgaccagtacggcagcgatggtggcgctggtacggagcggttaaatgctgctcgtgaataccgtgcggaaatcgaagagaataaccgtgtaatcgaagagaacaacctaaagattgctgaaaaccaaggaaagcttgcgatttatagcagcttgtacggcagcattactggtgacctcgatgcttacacgagtgcgctgaacaacttctctcggatttctaacacaatcaactccgtttctgactctttccaaactctcgctaatttgcagaatcaggttgccgacggcttcacaatgtctttggacaaggcacttgagtttgcgtctgtatatcctgaaattctgaacaatgccaccgtcgcggcagacgggcagctcacgttaaacgcagatgtcgtcaactcgttcattgctggcaaaaaggctgaactggatgctcagattgacagtcagattacgcagctcgaagcggataaggctgttctgacagcaaagatggaaagtgcgcaagcacaacttaagcttgccaaaaacgtaggcgatggcgaaggtcagattgccaaagaagtagcagagtatcgaatcaatactggtaacgctttgacggcagcgcttattgaaatgggcgttgaggagtcgaaagcgtatgctcttgctgctgcggctatggctggtaatgaagaagaatttgcccgcgttgcaaaagagtgttttgagaacatggatgacaatgctgccaaagcagcatataacatggcacactccatttttgttaacgcaagcaattcttgcaatagcatttctgaaattgctgcgcaggcgcatgaaacagctcaggctattgctgctatgggaagcggtgaagttgctggtagtagctccagtatcttcggtggaacagacggaacccaaacaggcggtctcagtcttgacctgtacaaaggcaatttcaaagggacggattataactatgaagcaacgtctgttagcttggacgattatgtgtcacagcttgaattagatatttcctcctatgaaaaagcaattgctcaaattgacggtcagattgctgcactccaagcgctgaaaaacgccccgctcaagagctttgaaagcagctcgggcagcagtggtagcggtggttccagcaaagaggtcgaagaatatcttgctgacattgacgagtattacgaagcaatgaagcgactggagtctatccagcagcgtcttgccaagttacagtctcagattgagtatgcagatacagaagaagagaagattgcgctcacaaagcaacttatcaatgtttacaatgatgaagcggatgcgcttgaaaatctgaacagtcttcgtagtgaaaccattgccaacggcaaggcagaactcgaagctcttggattcagtgtaagctatgacgctacgaccaacgagttcatggttcataacatggagcaccttaacgagctttatggtgctactcaggaagagactaacgaactcaggaagaaaaccgaagagctcatcgatacgatggagtctcttaatgactcaaaccaagagggagcttcctctctccgcacgttaaaggctgacatcaaatctgcaaagcaatctattattgattacttaaagcagattgttactgctgcaagcgatgttgtcgatgcataccaaaatgtgtatgagacgctccataatgcagccgatgaatatgccgcaaacggatatatcacgattgataccctgcagtctattatcgaactgggtgcgcagtatatgcaatacctcatggatgaaaacgggttgctggttatcaacgaagagaacatcaataaggtgcttgctgcaaagacgcaagaattagctctcaatcaggctatgacttatgtcgagcgtctccgccttgcattgcaggagaactccattgaagacctgaacaaccttctgtacgccactacagaggctacgaacgccacttggggattggtgtacgccaacctcgccttgcttggactggacgatgaccaatatcaagctgcgctccataacatcaatgcaattcgttctttggctgatagtgccgttagtggtatcggtcaaactgccggtaaaacggcagaggaactaaacaacatgaaagatggtctcgatgacatcttgaagtatgttatggatatgctcaagcaacgtatcaacgaccagattgatgcgcttgaggatatgaaagatgcctacgctgacattatttctttgcgcaaagaagctttggaggctgcaaagtcggaagcagattaccaagacaaggtagcagagaaggttaaggcactcgctaaattgcaggctcgtatcaatgcgctttccttagatgacagccgcgatgcacaggcgcaaaaggcaaagcttgaagaggaaatgtctcatctccagaaagagcttgctgacacccagtcagattatgcggtagatgctcagaaaagcgcacttgacaatatgcagaaagcgtatgaggagcagaaaaacgcagaaatcaaagtgcttgaggacagcatctcttcttatcagaagctgtatgatatggctattgcatatatccagtcaaactggggctcattatatgatgagctaattgcttggaactatcaatacggcgatgaactgagcagcactatcacgacagcttgggaaaatgccttagctgccgcacagagatatggaagctacgtcaatgcattgaatagcattggcgctgatatcgatgctgcaaatggcgctggttcaaattacattgttggtgaaacgacatatgataacagttcctccaacgaggaaatgattcatgctatcatcaaggagatgtatgcgaatagccaagcgcaccatactgccagtaaggaagagaaagcgcggctcgacaagcgcaatctgacccttggcgcaatgctcggtcagtacggcgtaaatgcttaccgccaaaacggaacgtggtatgtggatggtggtgcacttctttatgagaaatatcgtaagtacatttaccacactggtggtatcgcaggcgaccagccgactctaaagcaaaatgagattctcgccgtcctcgaaaagggtgaggcggttctcgatgcgaagaaagaagccggtctctatcgcattattgatttcactaccgcactgtcggacaagcttagcaagttgctcacccttacggacatgagccgtatgttcggtcagatgcaaggtgatgttacgaaggctgcttctgcttttgctccaatcaataacacacagacacccagcgtatcctttggcgatgttatcatttatggagcaaatgaagaaacggttgagaaacatcgtgaaatcaatcggcagttcaccaatgatgtcatcaaacaactgaatatcaaacgttaa

SEQ ID NO: 2581 - DNA, 1206 bp, Unknown
  Unknown gut bacteria
atgcttgagttacagggtaagtttggcactgcaaaggtgtttaccgacgtggtcgataacgagtctatctctcaggttatcaatcttttgaatcaaccgtacatcgagggaagcaaagtccgtatgatgccagacattcatgctggggcgggttgcacaatcggaaccacgatgaccatcaaggataagatttgcccgaaccttgtcggtgttgacattggatgcggcatggaaactatccgtatcaaagaaacgcatatcgaaccgcagaagctggacaaagttattcgtgcaggagttccgtccggtttcgagattcgcacagaagctcatagatatgcaagtagcatcgacctgtcggaactgtactgtgcaaagatggtcaatgtagaccgcgcatataaaagcatcggtacgcttggtggcgggaaccattttatcgaagccaacaaagatgacgatgggcatatctacatcgtggttcattccggtagcagacaccttggtctggagattgctaacttctatcaggaagctgcgttcaaggcgttaacctcgtattccaaggaagaaatcgaggaagtcgtcaacgagttaaaagcggcttggagacaaaaagaaatccaagctgttcttaaaggcatgaaggcaaagaagccgggagttccaaagcagcttgcatacgttgagggagaattgtttgagcagtatatccatgacatgaaaattgctcaacgttttgctgaacttaaccgccaagcaatgatggacaccattgttaagggtatgggcttccatgtcaaagagcagtttacgactattcacaactacatcgatgtagagaatatgattcttcgcaagggttcggtctctgcacgagctggtgagcggctactgattcctatcaacatgagagacggtagtttgctgtgtaccggcaaaggaaatgaagactggaacttctctgcgccgcatggagctgggcgtttgatgagccgcagcgcggcgaaagagacattcacagtttctgagttcaagaagcagatggaaggtatctacaccacatctgttggaagaagcacgctcgatgaatgcccgatggcatacaaaggtatggatgatatcgtaaacaatatcgaaccaacagtgaccattgatgccatcatcaagccgatttataactttaaggcgggtgaagaggaatga

SEQ ID NO: 2582 - DNA, 3885 bp, Unknown
  Unknown gut bacteria
ttgtatcttgattattccaaattggcgtttgataaaaacggcacgcccgaaacgcctacgctcgtcctgaagacgatgcatgaggagactattggggttatccccggtgtctataacctaaagctgtccgtcaagtttgcagaaccaagcgaaatgacattcgatgttcctgccatccttgatggcgagaagaactggatttatgacgagcttgttggatataaggtcatctacaccgaacactatggtatctacgttgttatgaacccgacaacaagtgctgacggtatttccgatgtgaaacacgtccagtgctactctttggaaaaagttctcgacacaaagaaattcttccttgaagacggcgatgacggtagtacattcaagttcttcaaccagacaaaccataacgacccggacactatcatcggtagagtccttgaggttgccgatggctggcatatgggctatgttgctccgtctgttgcccagcgctatcgtacattcgatgggtatgacgattaccttatgtccttcctgtatggcgactgccaagacaagttccgctgtgtgttcgtatttgacccttacgagcgcagtatcaatgtctacgacgccgatatcgaattagagacgcttcccatttatctggactttgataatctggttgagagccttgatatcgaagaggtgaccgatgaattggttactgcaatcagaccgtatggtagtgatgatgtagatatccgagaggtcaaccccatcggctccaactggatttatgaccttagctatttcattgcgaacggtgaccttcctgatgcccttgctgcaaagtgggaaacatggcaacgtactgtcctcaatcgccaaacatactacaaaggtttggtagcgttacaggcatccgcatcttccacgttacttgcaacgcaagctgcactcgcagatttgaagggtgagcttgatacgcttactgcacagcaaagcgttacgattcaggcgcttgcaatggaaaccacatcaaccggtagggctaaccagcaaaagttgcttgatgaaatcaaccagaagattgccgcgaagaaggctgagattgctgcaaaagaaaatgagattgctgcgcttgaatcgaacatcaagccgtatgcagagcagattcaagctgttgtcaacgaactgtctatcagtaagtttttttcagaagaagagtatgcaattttgcgtaagtacattattgagcaggatattaccgaagacacttttgtcgccacaagtgttgatacgactgtatctggtagttcctactcactggtaaacgaaagagtttccgtagatgcttcttcaatttctgaggtcgatttaaccaacgagttccaaaagaaaatgtatgtactttctggtggcaactttgctttcagtggaagccacaatatcactggcgatattattcgtggcacactggaggttggttcagacaaccagtatgtgctgagtttgtacgcaggttcaatcactgtcaatacgacaaaggcttcaagcggcacaatcacgcttgtcggttcgttatcatctttttcatctgatattagagatgtgaccatcgatgaggtaactacacgggaaggcagcaagatttcgtttgtctgcggcactggctctatgtatttgacagcaaatgtcagtgattaccaaaaatactctgtgcagttggaactgtatgactacgcgctggatgttcttgcagatttggctacacctacatatgaattttcggttgactctgcaaacttcgtatttgcccaagaattcgcaccgtttcgaaaccgcttggagctgggtaagggcgtgtatctcaacgtcggcggtaagcagacaatcacgccatatatcatcgagtttgagttagattttgaaaagcacagcaatttctcggttgtcttctcaaatcgttttaagcgaaaagactatgtcaatacattgaaagatatggtagagaccagctactctaccagccgcagcttcgatgccaacaagtatttgtataatcaggctgcaaatcaagctgcgtcagtctcgaagtttatgaagagctcattggatgcggcagtcaatacaattattgccgccaagaaccagagtgttgttatcaacggtagtggtatccatgtcggaggtgattccaagtatcagcttcgcattgtagatagcatgattgctatgaccgacgataactgggcgaccgcaaagcttgctattggtctgtttgcgtccgacgaggttggaacgtactttggtgtgaacgcagaggttatcggcggtaagcttattgttggcaacaatcttgttattgagaatgagacagacgacggtgttatgcagttcaaggtagactcaagcggcgcatggttgaataactccacgtttattctccaaaaggacaatggtggcaagattctcattgaccctatgtatggtattgctgcaggcacaggtgacctgtactccgtagatggcacaactgtttatccgtcatttattagtcttggtcgcagccgtgataacattctgttcgacgatgacgggatgcctcagaatgcaaatttctatctcgatatcgatgatggcagcgtctacatccgtggtaaggtctctgctacttccggtaaaatcggtggtttcactattgaagatgactacctccacgctggtagtggaagtgactatattgctctgaacggttctggcacaaatgctaactccgcctatgcaatgtgggctggtgcagccgctcccgcatctgcgaaattctgggtaaaaaagaatggcgatatgtatgcaaagagcggtacgtttcaaggtgtcgtgtctggcgcatcgttcaaggacaagtctggcaattccatgatgaatagcaactatgagttcactgctggatacctcaatctcaatggactgaatgttggaaacggcaattttacagtcgatgccagtggtaatgtttctgttcgaggtagcatcacaatggctgctggttcatcaatcaactgggcttctgtcacagaatcaaacgttggaaatagcagctcatatcagagagctaataccgcctacaaccttgcaaacaccgcaaactcaaatgcaggtaatgcatacaacttggcgaacaccgctttgcaggctgcctacgacaatgcattgagcgacagagatatcttcaatatgcttactaacggaagcacgcggtttggcatttttagcgattcaacatcgaacaggctatatatcaatgcaaattacatccgctctggtactattgatgctgatattataactctcggcagtgattggggtggcttcaagtgtgcacttggttctgacggtactggtcgttacacctatggtgctaaaatgtatgggtctaatgaggagttttattttatcgctacaaatgctggtgtccgtatgcaatccgatggtgaatcatttgttgtcacaagtacccgtattgttgcaagtacggatatagatacctcttcggacaggcgattgaaaaacaatatctcgtccgacttagacaggtacatcccattttttatgcgtttgcagccgagcgtctatcggtttaattctggtcgaagtggtaggttccatactggctttatcgcgcaagaagtagaagacgcattgcgtgatagtggtcttagtacgcaggattttgctggattagtaaagtgctccgggctgaatgatgcacattcaaaatatacagacgagtattccctgcgctatgcagaatttatttccctgaacacttacatgattcagcgattgtaccggcgtattgacgagctcgaacagaaacttcaagcaattgaagcataa

SEQ ID NO: 2583 - DNA, 747 bp, Unknown
  Unknown gut bacteria
atgctggcaaatccgaaaagaacaaaagatgaaatcgtgcagtggattcgagaatatttcgctgcaaacggcaacgactgctgtgctgttatcggcatttccggtggcaaagatagcagcgtggtcgcagcactttgtgttgaagcccttggcgcagagcgggttatcggtgtgctgatgccgaatggtcggcagaaagatatcgcagactccaagctgctggtcgatacgcttggcattgcaagtattacagttgacattggcggcgcatacagcaagatggttgatgtagtcggcagagcaatgccgtctggagtaagcaatcaggcagcggtcaatctccctccaaggctgcgtatggcgacactctatatggtcgcgcagtcattggctcgcggaggtcgggtggcaaacacctgcaatcgctccgaggattatgttggatactccacaaagttcggtgacagcgctggtgacttcagcccactcgcaaacatcatggtgcatgaggttcgtcagattggctacgaactccccattcctcgtgagctggtagacaagactccatcggacggtctttgcggtaagacagacgaagacaatctgggctttacctatatgcagctcgacaactacatcatgcacggtagtagtggggatgaagacatcgacaaagtaattgcaaagaagcatacgcagaacctgcacaagctcaatccgatgccagcctacggctcacagccgtaa

SEQ ID NO: 2584 - DNA, 453 bp, Unknown
  Unknown gut bacteria
atgccggtacaaattattgatggagatttgtttcagacccacgccaaatatatttgccatcaggttaactgtcaggcgagaatgggtagtggtgtggcgaagcaggttcgagccaagtatccagaagtctataacgcctatgttggcttctgcaacgaagagcgcaatgcgttcggtcagacgcagttcgttcaagctaacgacggtaaagtcgttgtcaatatgtttgcgcagagcaactacggatatgatgggaaactgtacacagattacaccgcatttcagagctgcttaaaacggattaagttgaccgtacctgcaggagaaacaattgccatgccgtttaagattggatgcggtcttggcggtggggactggaatgtgattttgggtcttatccaaaaggaactgtccgataagtacacagtagagttgtggagaaaagaggtatag

SEQ ID NO: 2585 - DNA, 1908 bp, Unknown
  Unknown gut bacteria
ttgtatcttgattattccaaattggcgtttgataaaaacggcacgcccgaaacgcctacgctcgtcctgaagacgatgcatgaggagactattggggttatccccggtgtctataacctaaagctgtccgtcaagtttgcagaaccaagcgaaatgacattcgatgttcctgccatccttgatggcgagaagaactggatttatgacgagcttgttggatataaggtcatctacaccgaacactatggtatctacgttgttatgaacccgacaacaagtgctgacggtatttccgatgtgaaacacgtccagtgctactctttggaaaaagttctcgacacaaagaaattcttccttgaagacggcgatgacggtagtacattcaagttcttcaatcagacaaaccataacgacccggacactatcatcggtagagtccttgaggttgccgatggctggcatatgggctatgttgctccgtctgttgcccagcgctatcgtacattcgatgggtatgacgattaccttatgtccttcctgtatggcgactgccaagacaagttccgctgtgtgttcgtgtttgacccttacgagcgcagtatcaatgtctatgacaccgatatcgaattagagacgctccccatttatctggactttgataatctggttgagagccttgatatcgaagaggtgaccgatgaattggttactgcaatcagaccgtatggtagtgatgatgtagatatccgagaggtcaaccccatcggctccaactggatttacgaccttagctatttcattgcgaacggtgaccttcctgatgcccttgctgcaaagtgggaagcatggcaacgtactgtcctcaatcgccaaacatactacaaaggtttggtagcgttacaggcatccgcatcttccacgttacttgcaacgcaagctgcactcgcggatttgaagggtgagcttgatacgcttactgcacagcaaagcgttacgattcaggcgcttgcaatggaaaccacatcaaccggtaaggctaaccagcagaagttgcttgatgaaatcaatcaaaaaattgccgcgaagaaggctgagattgctgcaaaagaagatgagattgctgcgcttgaagcgaacatcaagccgtatgcagagcagattcaagctgttgtcaacgaactatctatcagtaagtttttttcagaagaagagtacacaattttgcgcaagtacattattgagcaggatattaccgaagacacttttgttgccacgaatgttgatacgactgtatctggtagttcctactcactggtaaacgaaagagtttccgtagatgcctcttcaatttctgaggtcgatttgaccaacgagttccaaaagaaaatgtatgtactttctggtggcaactttgctttcagtggaagccacaatatcactggcgatattattcgtggcacactggaggttggttcagacaaccagtatgtgctgagtttgtacgcaggttcaatcactgtcaatacgacaaaggcttcaagcggcacaatcacgcttgtcggttcgttatcatctttttcatctgatattagagatgtgaccatcgatgaggtaactacacgggaaggcagcaagatttcgtttgtctgcggcactggctctatgtatttgacagcaaatgtcagtgattaccaaaaatactctgtgcagttggaactgtatgactacgcgctggatgttcttgcagatttggctacacctacatatgaattttcggttgactctgcaaacttcgtatttgcccaagaattcgcaccgtttcgaaaccgcttggagctgggtaagggcgtgtatctcaactcggcggtaagcagacaatcacgccatatatcatcgagtttgagttag

SEQ ID NO: 2586 - DNA, 768 bp, Unknown
  Unknown gut bacteria
atgagcattgtccttaacgaatatgattgggcagaaaaaatgattgccaaccatgaccttgggaagaagccgattgagacattgagtcgtgtgtccaagtattattacgagaatcactacagcaaaagggagattcggagtttgctcgactccttcatgctgcaatgtgacccttctgcttcacttgttcattggtcggatatgcttgataaagttgcaaagaacgtaagcaagtttccactcatccgtctggacggtgtggatatcaccagagaagagctcgccaagattgagacgcttgaaggtaagcaaatccggcggttggcgttcacgcttctctgcgttgcgaaatattgggacgccgcttccgaccggaacaatggttgggtgaatacttcggacaaagagattatgcagatggcgaacatcaatacctccattaagcgtcagagtttgatgttcgccgaactgcgtgatgccgggttcattcgcttttctaaaaaaatcgacaacctgaatgtccaagtgcagttcattcaagccggtgagacggcgatacatatccaagacttcaggaaccttggttaccaatacctcaagtattacggtggcgcatatttcgagtgcgagaattgtggactgactgtaaaagcacagtcacctgcaaagggtcgcccgcagaagtattgccccagttgcgctgtcgaggttaagacccgtcagactgttaatgcagtaatgcggtgcagaaacgccttaaagagttga

SEQ ID NO: 2587 - DNA, 372 bp, Unknown
  Unknown gut bacteria
atgggttttcgtacaggtgcctatgcaaaaatttgggaagtaactcccatgagcgacacgagcacaaaggttcggttgtcggtcagcagaaagaacaagcagaccaatgagtacgagcaagacttttccggctttgttcttgccattggaactgcggcggcaaagaaagctgcttgtctgaaagagggcgagcgcattaagctcggagacgttgatgtcacaacgaagtatgacaatgagaaaaaggtgacgtacaccaacttcaagatgttctcctttgaagttgagggcgacgagagtagctctcaaaccacagaccctcagcctacggttgatgatggcgaaattgatgacagccggttgccattctaa

SEQ ID NO: 2588 - DNA, 1917 bp, Unknown
  Unknown gut bacteria
atgaacattccactcaaaatgaacagggactttgaaaaggctatgaccacactcaatgagcgctatggtgaagatttcgagtacctgaacggtttccacgaaacgcaactgaacttttcggatttcatcgatggttttattgacaagaatgtcgccgacgtgaccatcgatgccaatgcgaacgcatccaacaaggatattcgcagtcttttgaatgaaaagggtaaatctcacgataagctgttcgctttcaacaagattttctatgagatgaagaagcgctacaacctgaaaacagcccgtgaatggcttgaaacagagtataacggcgggttttatctgcatgatgcgtctacttctacatatctgccgtactgctatgcctatgacctgaccagactggcaaccgagggtcttttcttcctcaaaaactacaataatcaggctccaaagcacctcacaacgttcatggatgacgtaattgagtatatcagctacatgagcaatcgtagttccggtgctgtaggcatccccaacgtccttatctggacgtattacttctggaaaaaggactgtgagagtggtcacttcattaagaaccccgaatactacatcaagcagtgcttccagaagtttatctaccgcctgaaccagccgtttatgcgcatcgaccagactgcttttgttaatgtgtcaatttttgaccggaattacattgaggcgttgttcggcggcgtgcaatatcctgacggaacatatgtaattgactgtgttgaagagctgattgagcatcaaaagctctttatggaggtcgtttcgcaaatcagaagcgagaatatgtttacgttcccagtgctgacatacagtttgctttaccgtgacggcaaattcgtcgatgaagagttcgccagatggtgttccgaccacaatgtaacgtggaatgacagtaacttcttcatcagcggtgatgtaaacacgctgagtaactgttgccgcctgctgtctaatacctcaaaactcaatgcgttcatcaactcgattggcggtacagcgctctccatcggttctgtaaaggtcaacacaatcaacctcatgcggattgcgttggaaactgagtgcgacgagaaaaagtatcttgctctgctcaaaaagcgtgcgttgctgtgttgtaagacactcgatactgtacgccatatcatccagagaaacgttgagaaggggttgctcccaaactatcaggatggcgcggtcgagatggacaagcaatactgcacaatgggtatccttggtctgtatgaagtcatcgaggcatttggttacaccaagacggatgagtttggttacattagttacaccgacgaaggcatcgctttcgcaagcaaaatctttgaggtactgaatgaggtcaaggacaacttcaccgatgcttactcttttaacattgagagtgttcctgcggagcgtgcggcagttatcctgtgccagaaagacaacgttctgtacgaccacaatgacaagttcatctactcgaaccagtggattccgctgtctgcgaaatgcaccattcaggagaagctccgcctcagctcaatccttgatgaaaagtgttctggcggcagcatcgcgcacatcaatttggaatccaacttcccgaatacggaaacagcgtggaagatgctgaacaagattgctcaggctggcgtgatttactttgcgttcaacacccgtatcaacgagtgcaagaaccatcacggctttgttggcactgaccattgcccagtatgcggtgagcctgtctttgatacataccagcgcattgttgggtatctcgtcccatcaagggcttactccaaagaccgtttccgtgagtttaacacaaggcagtggtacagctatgcggaggctatgagcgaatga

SEQ ID NO: 2589 - DNA, 1077 bp, Unknown
  Unknown gut bacteria
atgcccgcaaccaattttaattctacagaaagcgaggtggcttgtatgccccgaaaaacgaagcagaacgaaatcacaagccctgagcttttgagtcaggttaacccagacaatgttcgtttgaagcaagacttcattgcatatctgcaatctgttcagcgtagccccaagactatcgctggatactccaatgacattgatattttctgggtatggaatttgcagaacaacgggaacaagttcttccccaaaatttctaagcgcgattatgctgcgtatcagcattggcttattaacgagaatgggaactcaccagctcgtgttcgccgcttgaagtctgcgatttcttctttgtcgaactatgttgagaacattctcgatgacgaagatgagtttaaggacttccgttcgacagttcgaaaaattgagaatccagctatgcagcaggtaaggaagaaaacagtctggagcgacgaggctttggacaaactccttgatgatttgctggcatccggtcaaaacaaaaaagcgtgcgccgttgctcttgcaatgtgcagtggtcgccgtaaagcagagctgtgtcgattcaaagtggatgacttcaaagatgaaaacctcgtgtgtggtggtgcgctgtataagaccagcgaacctattcaaacgaaagggttcggtcttggcaagtacatctactgctatactcttgcgaaaaagttcaaaccatatttcgatgcgtggatggcggagcgccaaaagctcggcatcgagtgtgagtggcttttccccgccggtactacaagtgagcagatgagtgataccacactcaatagctgggctaacgcattcagccgcatgactggtgaggatttctactggcatagtttgagacattacttcacaacgcatcttgccaaactcggactgcccgataatgttatccaagatatcgtcggatgggagtctgccgacatggttcgtgtctataaagacctgagtgccgaggaacaaatttctcagtattttgatgaaaatggagaaattcgttctgatgctcaaaagtctctggcagacctgtaa

SEQ ID NO: 2590 - DNA, 888 bp, Unknown
  Unknown gut bacteria
atgtatcgcggttctggctttttgccaatgtgcaatgattgcgtcgaggatatgtacgaacagtatcgcgcaatgctcggcgatgacaaggcggctatgaagcgtatgtgcatgaagctcgacctctattggaacgaggacatctacgcaatggttgaacgcacggctggcgttcactctcgggttcgcaattatatcggaaagaccaacatcattcgctatatcgacaaaacctttgacgacacgcttgatgaagaggcgttgcttgaaccggaagagactcctgccgcttcatatatcgcgcagccggaagatactgccgaagcagacgttgaccaagcccttgttgatttctggggtgccggttatactccagacttttaccttgagttggaacgtcgctacaaggattggactggcgacaggcaagtcgttgacccaagtgagcgtgcactgtaccgccagatttgtttgcttgaatccattatcgcacgcgacagcgcacagggtaaaccaattgataagaatgtcaacgcgcttaattctctgcttggcagtatgaacttaaaaccggcgcagaagaagaacgatgtggacgctgaactcgacaagatgccactcggtgttggtatccagaaatgggagtacagtagacctcttcctgaaacgccaaaagaaaagcgcgatatccgtggcacgattaagaatatcacgacgtggtatcttggtcacgcttgcaaaatggtcggcttgcgcaacagttattgcaagatgtacgaagatgcaatggatgagcttcgtgttaaacacccagagtacgacgaagaggatgacgactccttgttgaatgatatctttggtagcgctcaatccagcggtgatatgtaa

SEQ ID NO: 2591 - DNA, 303 bp, Unknown
  Unknown gut bacteria
atgagttgctataaagacggtggctgtggtatttatgagatgtattcttgctatgaatgtccagcaagcaagccggagtaccttaaaagaaagtcgcgcgagccgcaaagattacaggcaatcggaaacctgcacgacgtagccaagcagattctggatgacgaagtggtcattctcctccgtcaatacggaacaacgcttgcaccgggacgaatgggagatgagagtcgtgttccaaagtggctgctcgttcttgcggcagacagaatcgaggagttaaaaaatgcaagaacaaagcaataa

SEQ ID NO: 2592 - DNA, 384 bp, Unknown
  Unknown gut bacteria
atgccctgtgactacagcccatatacgttaccgaccattgacttcgtagctggagagacgcaggactttgcgttctacacctacttctataagaaccaccagccgtttgcgctgagtgggtgtacggcaaacttctctattgttagctttaccaacaagacaggtgtaccgattcttacgaagccaatggaatcacattttaacgatgatgtcaccgcagaaaatgtgttggcggtcacattagacccgttggacacggtagatttgtgtggtaagtacatctatcaaatcactatcaaagatattaacggcaatatcgagattcccaaacaaggcatcttatttattaccaataatatcaacaagagtttcatcaggcaataa

SEQ ID NO: 2593 - DNA, 483 bp, Unknown
  Unknown gut bacteria
atgtatctgtatcacggtactccggcagatttcgatgtaccaaccctgaacaagtgtaagccgcaccgagatttcggatgcggcttttatcttgccacaaattatttcgatgccttgccgatggcagccaaaatctctcgggtgggatatgtccaaacatatctgctcacagacttggatggactttccgttctggagttcgatgaaaggtctgaggattggctttggttcgtggtttcttcaaggcttggcatcgctccaaacgtcgatttggtaatcggatatatggctggcggaggaagtaatttgaaaagtaaatttacaaagctgagaaatagcaatgtgtcgattgacgtgacggctacagcaatgcgaaaagagttaaccagtacgcagcttggcgtacaatatgcgttcctgacagaaaaagcattgtccaagctcgttagggtctcaactgaaatagtggaaatggaggattaa

SEQ ID NO: 2594 - DNA, 621 bp, Unknown
  Unknown gut bacteria
atggctaagtcggaaaagaaaatttcaatcgcatctttggacaaggtgctcaaagaacaagcagtggatattgcaacagaacagtggtttggtaatgaggtgaaaattaagcacacactctctttctcggaggcgctggcatttgtggacgatgtggtgtcaagctgctttcatacgactggtggttatatgccagagttgcaggagttcgttgtaaagagcaacatcttgactcgctacgccaacttcaaccttcccgataatttagagcaccgctattctttgctctataacacggatgcagttgacgttgtgattcggcacatcaaccagaaacagctcgacgacattctggaatccatctctgaaaagattagctatctgtgtgagagcaatattgctgctattgagcgtcagatgaatgaggttgtttctgcgtttactgagctgcagaaaaagaccgaggctatgtttgccaacattacgccagacgatatctcgaagctgacgtccgctatggcagatggtcaattcagcgaagagcgtcttgtcaaggcatatacgaatcagatgaagggtgatgccgatgagtctgtcgagcaaactgaacgcatggattaa

SEQ ID NO: 2595 - DNA, 195 bp, Unknown
  Unknown gut bacteria
tccggtgtcgctggcgtctacttcgacaaagaacgtaagaagtgggttgccagcattacttataaccataagaaagtttacttgggaagatacgcggtcaaggaagaagcaatcttggctcggctgaccaaggaggtcgaattgtataaagagttctcgccgcaacgagggcttttggaatctctaactctatag

SEQ ID NO: 2596 - DNA, 276 bp, Unknown
  Unknown gut bacteria
atggcaactgcggtcaagaaatgtcgcgtttgtggcaaggagtatgaagcctgccgcagcgcaaatagagccgcaggcgtgttccggtggcaagaggtagcgtgttctcccgaatgtggaagtatttatctccagcagataaatgaatccagaggcattgttgatgcgcggaagaagagcaagcataaaaagcctgttgttgccgaacctgttgtttctgagcttcaggtcgcagaagagattctgccggatgaggcgcctgctgaaatcgaataa

SEQ ID NO: 2597 - DNA, 2667 bp, Unknown
  Unknown gut bacteria
aagtggaagcttacgctccccattgcagaggcaagaaagaatgacgaggtaatctccctcgccgacagtcaggtactccgctggctggacgaattgaacggtatcaccgatgctgagacgcaggcgcggaaaatcaaaggagaaatcaagcggcttcgtaaagagccgaatagcgttccaaatcgtcgtcaaatcaagaagctgtacacgcaactggacgatatccagtttaagccggactatctctgcgtcatcatcgataaagagaaggactaccatcgagcttgccgtggatttagcattaacggtcttcggtatcagcggttacttggaacgaatggcggcgtcaagaacgagaccatcgtgttcatcagcgaacgccatgccgatgagattcgccgccgcattgacaatggtcgcaacatggaaaaagaaatggtacctgccaaactggaggcgtataaggcacttacctgcagtgcatcaatccctgtgtcagttccgcatggcattctcgttgttagtgactgtgagaccgagttcttgtcggatatcatctacctgaatgatgagcaggacggagagccaatcatggaagaacgtaagcaggtcatggtgcaactcaacgaatccgatggatatggcttgatgctcccatcacttgctgcccgatggggtgaagagcttggcttagactacctcgtcagcggcgtgaacacacgtttctcttgggaaaagggtatggtcttcacgttcgacttcttggatttcgcagaaaatgtcgctgagaactatattgttaaagacgcttggggtaacgatgtggacattcgtaatgttgagctgattcttaccacgtccatgctgaaactgtgggactcctacgatagctgtgacgattatgtaaacaactgcttggcaaacggctacacctttggcatcgccaagacttgcccaaaggaacttgagtctgagcggacattgaactatcaattcattcagagctacgagctgagcgacgatgacattgagcagcttatcaaaccgacgatggatgagattcgagacgttctttatgcggattgggcaaagacactgctgttcttaaagggtgctggcttgaatgaggataatattgaccgcgttgatgacgactacgtcaaggcgattatgattgaaccgcagattttgaacgacccttacgtccagagcagtatctatcagatgattcgtaatcgcatcaacgaagccaaggtcggcgtgctcaaagtacatgggaactactccattgtctccggcgacccattctcactgtgtcaacacatcttcgggctggaggttacaggacttctgaagtctggtgaaatctacaacaaatattggtgcgaccagcacgccgaacggcttgcctgttaccgcgcaccaatgacctgccataacaacattcgtcttgtattcccacaccgcagcgacgaggcatctcactggtatcaatacatgacgacctgcacgattttcaactcgtgggacactgccgctcatgcgctcaatggcatggacaaagatggcgaccttgcaatgcttaccgataacaaggtgcttgttgataatctgaaagtgctccccgctcttatgtgcgtccaacgaaaagcaaagaagaaaattgtcaccgaggcagacgccatacaagccaacatcgatagcttcggcgatgatatcggaaagaccacaaactggattacctcaatgttcgatgtgcaggcacagttccagaagggttccaaggagtacgaggaacttgactatcgcataaagtgcggacagctttttcagcagaatgccatcgacaaagcgaaaggcattattgccaagccgatgcctcgtgagtggcacgaccgacatagcgccaatacaatcgaagacccggaacggcgcagattctatcagcgtctcgtcgcagacaagaagccatacttcatgcgtattatctaccctgctttgatgaagcagtataacacatacataaaaaacacaaacaagaatgccatgcgcgagttccaaatgacggttgacgagatgttggaaatgccgcgttctgaattgagcgagcggcaaagagatttccttcgttactatgagagccggatgccggttggtaaccatgactgcgtaatgaacagaatctgcaaacgctttgagaaagagtttgacggctacctcggtcgccacaatgctgatgttgactttgactataccgtgatgaagagcggcgttgagtacagtcgaacgcagtacaatgccatcttgaaactctatgagaattacaataagcgtctgcgcagctacgccgtctttgccaactatgagcgggtcgatgagtacgacacgttctctcgcatgattgagatgcgctccgagttcgagcaagaatgtgcccgcatttgctccaaccgttttgtactgtgcgacatcgttctggatatttgctataagaagagctcgaccaagcgtttcgcgtgggaaatgtgcggcggcgaaatcatccagaatcttttggataagcataacggggttatctcttacccgacggttgaccccgctggggatatcttcttctgcggtgacagattttcattacaacaaaaaatgattggagggacgctatga

SEQ ID NO: 2598 - DNA, 750 bp, Unknown
  Unknown gut bacteria
atgaccagagaagaaaacaccgctaaattggcacagttgcgctctgaaaccgaagcccttgtcaaggattacaatgatgcaatccagaatggcaagtttgaggacgcttccaaagccgacaaagccatgaccgagaaaatcaatgagtacaccgctaccgttcgggatatgtgcttcgaggattgcaagaacactgataatcccatgcttaccgccgtcacgaccctgtcctttgtgactatcggggttaaggacgagcagaagggtgatgacaaggtgccggttcgcgctatcgtggacaaggaacggcagattgacctgctcaagctccacaagtattgtggttctatcggcgccaatgagaattggtcgagtatcgcgcagaagatgaacttcctgttgaccgcgcagaaagcggttgaccttggtatcgaccccaaggctgtcaatgacagctatgctatgagcgaaatcgcccgcgagtttgatatgggcaagaatccgaccagtaagacgaacctgctcaagactttgcagacggttatcaccgctatgctcggcgagcagtacaaggcaacgagccatgatgtcaacttcctgatgtcggtttattccaagaagaaccgcaaggcgctgaccgtgacctgcgcaaatcaccggtatttccgcaattatctggctgaggtttgccaccgcattgtcaccggcaagacctatgagctggatttcaaaaccaagaaagacaactaa

SEQ ID NO: 2599 - DNA, 399 bp, Unknown
  Unknown gut bacteria
atggcaaaaatcgttatcgcaggcgacgcagtcgtcgtcacttccgcaatgaagcttgaggacatcaagaccatcgagaagtatcgtcccaaggagctcgtcctgaagggcggcgaggatggcaaggagcccatcttcggtgtcggcaccactcatggtgcaggcaatatcaacgcagttggcgcatccttcggctccgagacccgtgacgatgacaagctggcgtgcatcaccctgttcctcgacggtgttaccggcgatgtgaaggattgggtcgctgaccgccttggcgctgccatcatcaacctcaacaagctcgaagagaagctccccactgttctcgaagagattgcggctgagaaggcaaccgtgatgagcaacatcactgtcgctcagtaa

SEQ ID NO: 2600 - DNA, 3192 bp, Unknown
  Unknown gut bacteria
atgagcaatcaatacaccctataccacttgcatagtgacctttcaaacggtgttaccaacattgactccgttacaaagtacggcgaatacatagagcgtgccaaagagtgcggcatgaaagcaatggcgtttacggagcatggctctgtttttgagtggtggcacaagaaaagtgctatcgaagctgctggaatgaagtatatccacggcatcgaggcatatcttacgcttaacatcgacgaaaaaatcagagacaactaccactgtgtcttgcttgcgaagaactacgacgggttcttagaactcaacagccttgtgtctaagagtttctgcagaaccgacaaccacttttactacgtcccacgaatcacgttcaacgaattgtttgcgacatctgacaacattatcatcactacggcttgtgtcggtggtgttcttggaaaaggtgacgaacagattcagcagtattatctggattttcttgaacgaaataagcaccgctgttttttagaagtcggtcaccacatggatgaaaagcaggtcacctacaacgaaaaactgttattgcttagcaagagtaccggtgtccctttgattgcaggaactgatacgcacgtcctcaatgcagagcatgaaaaaggaagaagtatcttacaggcatctaaaaacattacgtttgatggtgaagaacgttgggacttaaagtttaagacttacgacgagttagttgctgcatatagagagcaagggtcgcttccagaagcagaatatatgcaagccattgaaaacaccaatgtgatggcagatatggtagaaccgtttgaattagatagaggtacaaagtacccacatatctactctgaacccgagaagacattccgtgacaagattcagacagcagttgagaaccacccatatgcactcaagcatcacgcaaaggaagagttgcagaaaactatcgatgaagagttcgatgtttacaaggcaacgaagtcaattgactttatgctgctccaaacttacttgcgtgagtgggaaaagcaaaacggtatccagtgcggctatggtcgtggctcagtttcaggtagcatgattgcgtatctcttggggattacgcagatggatagtatgaggtatggtttgaatttcttccgctttatgaatccgtcccgtgttacaaacgctgatattgacacggactattctggcaaggacagagaaacaattaagcggttcttgcttaaagataagatgaatctgccgagtattcgttcagcagaaattattacctttaataccattgcactcaaaggtgcaatccgcgatgtttgccgcgctctctataaagaccgcgcagacatgaactatcttcaagtggcaaaccacatctgcaaagaagcggagctccatgaagatgctatccgaaagaagtatccagatgtattcaagtatgtagatatcgttaatggaacaatcgtctccatcggtacacacccgagtggagtccttatcagtgacctacctattgaccaaacggttggtctgtgcagtatctccacatccgagtatccggtatccatgattaacatgaaagagctggacgacttgatgtatgtcaagcttgacatccttggcttggataatatcggtgtcatcaacgatacctgtaaaatgcttgggattgagcgcttgacgccagacaacactgatatggaggatatgaatgtgtggagaagtatccgagacgatacgacgcttatcttccaatgggagtctgacagcgcacagcattatctaaagcagttcatgtctgatgccacgctcgatattgctcggtcaaagattccaaatttctcaatgctaaagtggatgtcatttggtaacggcttgctccgacctgcgtgtgccagcttccgtgatagtgtagccaaaggcgagttttacgataacggttttgacgcactgaatgagttccttgctccagaggcaggacgaatcgcaatgcaggaaaccattatgcagttcttggttaagttctgcggctactcaagcgcggaatcagacaacgtccgccgagcgattgccaagaaaaaaggaacagaaaagctcttgccggagattgaagaacgctttgtggcttattgctcaaaggcgtacaagatgagtgcagagcgttgcgaagaggttattaagccgttcctgcaaatcattctggatgcatcagcgtatggcttctcgtggaaccactcagacgcttattcgtccatcggttatatctgcggatatttgcgctactattacccattggagttcttaacagcagcattgaatatcttcggagacaatatggacaagactgctgacattacaagctatgcccataaggtcggtattcgagttacgttacctaaatgggggttgtccagaggtgaatacttcttcgatagagagcggaaaatcatcgccaagggtctcacgtcaatcaagtatatgagcgctggtcttgccgatgaactgtacaaccttgcagcaaaaaacaagtattcctgttttatggatttgttgaaagacctcgatgaaaaaacgagtattaactcaaggcagcttgatattctgattaagctggatttcttctctgatttcggcaatcagcgtgagctgcttcggatggttgacctgttctttaatatcttcaagagagggcaagcgaagcaaatcaaaaagactgaggttgatggaacacctctcgaagaaattgtgaagcgatacgcggtcggtgttacaaagtctggtggcgaagctaagagctacacacttcttgatgtgatgtcgattttgcgtggtgcagaagatgcagtaaaagcagttggcatggatgacctaagcgatattatcaaagtccgtaacttctatgatgtgatgggctatatcggatatgtgtctggcaatgaagcggacagacgcaagctatacataacagatatgaagccactggttcggagaagagatggtgagcaatttgcttacagcgtcttcacaaaatcaatcggtagcggcaaggaaagtaggttcacgttattcaatcgtgagtttaagaaagagccggttaaagtcggtgacattatttactgtaaaggctaccagcgcgatggtgagtatttcaagctgacagcgtatgacaaggttctgtaa

SEQ ID NO: 2601 - DNA, 2751 bp, Unknown
  Unknown gut bacteria
atggtcgcgggctctctttcagcgttttcgctgagcgccgccgacgccaagtccaagaccgacgaacctctggttcccgggattgacgaggagaccggcgttcctacaatcagttacctcaccgaaaaattcgcgacccccgaggataagctcgccacgatgacgaagtatctctcgaagggcaactacgagctctatgtcgagcctgtatccggcgaaatcgcgtacgtcaacgtgaagaccggacagatactcttctcgaacccgtgggatatcgcggatgattccaccaaggcttctcagtcggtcaaagaggagctgatgagccagatcatcatcaagtacaccgacaacgattccgagctcgacctcctcagcttcaccgaggcttgccagagaggtcagatcaacgtaaagaagatcaagaacggcgtaagagtcgagtacacgatgggtcgtgaagagacccgtaagctcgtcccgaagcagattgaggcgacccgcttcagagagcttattctgaacaacattcccgagggcaccgcgaaatccaagatggacgcgttctacactcttaaggatccgaacgatgaaaacctcaccgagcgcggaagaaccgagcttatcgcgactttcccgatctgtgagcagatggcgatttacgtcttcgacccgtacgcgtccgaccgtgagctgaacctcatcgagggttatatcaagcagtactgccctgagtacacctacgagacacttgaggaagaccacgcgatgactcagtacgaaggtaccgataaggcgcctgtcctgttcagactttcgcttgagtacacgctcgacgacgacggaaatctcgatgtgagacttcccgctaacggtatccgttacgacgagtcgtccttccagcttaccaatatcagaccgcttccgtatttcggagcaggctccaacgattatgaaggttataccttcttcccggacggttccggagcgcttgtccgcttccaggacgtcaccaccaagccgcttatcctctcgagcaagatttacggcgaggattacgcttaccagaaggtttccggacagcataaggaagtcatgagaatgccggtttacggcgttgtcgagacgaacgtggcagtcgaaaagaccaccaccgagaccgatgaggacggaaagaagaccaccaagaccacgatccgcgagataaagaccaaggacggtgaggtctacgagaagaagacaaacggcttcctcgcgatagtcgaggagggcgacgctctcgcaagcatcaccaccaactccggcggaccgctccacaagtacaacaccgtttacactcagttctccccgcgtcctaaggattcctacaacctcgccgagtctatctcggtcggacagaacgcaacttataccgtcgtttccaagcgtaagtacgcaggaagctatcgtataaagttcatcatgctgactgacgacgagctcgctaaggagtccggactcacgaagtactacgaggcatcatatgtcggtatggcgaaggcttaccgcgagtacctcgaggctgagggcaagctcactgacctcactgacgtgaaggatcagattccgctttacatcgagtccttcggttgtatcgacgatgtcgagagaatcctctcgatcccggtcgaggttctgaagcctctgaccacctttgatgacctcaaggagatgtacggcaagctcgaggaagcgggcatcacgaatgtcaacttcaagctcaccggcttcgctaatgagggcatgaatgatacctccgcttacagtgtcaagttcgacaaggaagtcggtggaaacaagggcttcacttcgttcgttgagtacgctgagagcaaaggcatcggcgtgttcccggacttcgacttcgcgaacatcggcaagttcaagctctttgacggcgtttcgatgagaaagcacctcatcaagacgatggataaccgttacacgaccaagcgttattatgattcgacgctccagtcgttcgagcgcggctacgcactggcggtctccccgtccgtttacagctacttctacgatcatttcactgaagcgtactcgaagctgaatccttccggaatttcggttgctacactcggtactgacctgaactccgactttgataagaaggatccgtacaaccgcgaggataccaagggttataccactgaccttctttcgagaatcaaggaagattaccagaacgtcatgattgacggtggtaacctttactccatcgagtatgctaccgatatcatcaacgtttcgctcgactcgtcgagattctcgggcgccagcgaggctgttccgttcgtcggaatggtgctccatggcagcaagaacttcgcgggcaccgctatcaacatggcgggtgacacgcagtatgagctcctgaaagcgatcgagaacggcgcttcgctgtacttcacgctttccgctcagaacactcagctcctcaaggaggatatggagttccaggaatactattccgtcaacttcgatatctggtatgattcggtcaagaatctttacaccgagctgaatgacgctatcggaaatcttcaggataagaagatagtcggacatgagttccttgttggtgagcgcgtaccttccgctgaggagatcgcggccgacaagcaggctgaggcggacgctctggcagcagagcaggaggctgaggagctcgctaaggaaaaggcagaaaagaaggca

SEQ ID NO: 2602 - DNA, 2145 bp, Unknown
  Unknown gut bacteria
atgatgctcggatccacgttcggggtcggaagctatgcggccgatgcctcgtcggatgacggctcgtccacggtcagctacgatatagccgacgttcaggatctcttgaacgcggaaagctatactgactacgctgcccgtacggctgacgttccgaagggcagatcagaggtaaagatagacgcggttgactacaacaaggacgaaactgacgcgaaggttgaggtcgtctcgaactacaacggcgcgtccggaagcgctctgctgactccggcggacggtaccaccgcgtgggatattgaggtcccggcgaccggaaagtacgcgattgatatcgagtacacgttcccgacggacggcaaatccaccgctatcgagcgcaagctcaggatcgacggtgagtacccgttcaagggagtgagatatctctcgattaccaaagtgtggcgcgatgaataccagacggcagaggacggaagtcccgctttcaagaccgatatcaacggcaatgacataaagagccagaagtccctgtcttccgagtggcgtacatataccgtgtgcgactccaccggctatgatatcaacccgtatcagatagttcttgaggccggcaagcacacgatctcgctcgaggcgagccgtgagatccttgtcatcaagtcgataaagatctatccgtacaaggatcttccgacatatgaggaagtcaaggcggaatacgcgtcgaagggctatcagtccgcggatggcgccgagaagatcgtaatccaggccgagtatccggacgcgacttccgaccgcaccatctatccgcagaacgaccgcacctccgcgctgactcagccgcagagcccgtcgctgtccaagctcaacgctctcggaagcacgaagtggcagaccgtcggacagtgggttgaatattccttcacctgccagaagtcaggtctctacgagatcgctccgagatacaagcagtcggacctcagcggtatgtacacttcccgccgtatcagaataaacggcgagatcccgtttgaggaagcaaactactgccagttcaacttctctgacgagtggcagtcagaggcgctcggaaacggaaaagagaccttcgagttctatttcgaagagggcaagacctacacgatccagctcgaggtcgtcctcggcggaatgagcgagatcatcggacgcgttcaggcgtctcttaccgcgatcaacgccgattacctcaagatcctccagatcaccggcgctgacccggataagtatcgtgactataacttccgcaacctgattccggataccatcaaggatctgtacgctcagtaccttgagctcaccgcgatctccaacgagatcaccgaggtcaacggaataaagggttcgcaggcggcgtcgctcgataatatcgcgcgtgtcctccacaagatggctaccgacgaggatgaggtcgcgagaaacatgtcgaccctgaagacccagatcggtaccctcggtacatggctcaacaacgtcagaaaccagcctgtgcttcttgactacatcgcgattcagcctgtcggagagaagctcccgagagctgaggcgaacttcttcgaggctgccggcttcgagatttcgtccttcgtgatgtccttcttcaccgactactcgaacctcggcgctaccatcgagctcaacgaggatgacgtcattgaggtctggaccagcgcgggtcgtgaccaggctcaggtcatcagatcgatgatcgataataacttcacgtctgtcaccaacatcggtgtctcgttgaagctgatttcggcgggtacgctgcttccggcaacgctttccggaaccggtcctgacgtttcgctcggaaacgcgcagggcgatccggttcagtacgcgatacgtaacgcgacgcttccgctcaatgatttcgataccttcaaggaagtcacgagcagattctcgcaatccgctatggttccgctgactctgtacggaacaacttacgcgctccctgagacgcagtcgttcaatatgctgttctaccgcaaggacgtcttcgcagagctcggcatcgacattccgaagacatgggatgacctgatggccgcggttccgttccttcagtacaacaacatgatcgtcggt

SEQ ID NO: 2603 - DNA, 1695 bp, Unknown
  Unknown gut bacteria
atgaaaagacgactcacaagcgcggcgctcgctctcattatggcggcgacggcggtcactgcggcgtcatgcggtcaggaagacaacctcgactctgtcggcgaggacaagatcgcgaacgcgacgacgctcaatatatggggcataaagggtgagggcaccaccgatgaggcgatagccgctgtggaggaggccatgagtgagatcactcaggctcagttcaacacggcgataaagctcgagctctacaccgaggccgagtatgacaagatgctcgagaagcgcatggacgagatccaggagcagctcgacaaggaagaggcagaggctgaggcaaagaagcaggcagccaaggaagccaagaagaacggcggcggagacaccaccactgcggaggaatccaccgacgagtccaccgaaatcgtcgacgagaccattctcgacgagtacggactcccggagaccttctacccggatgtcgaggacactcagctcgatatcttcctcattaccgattatgatatgctgatgaagtacagcgagaaggaagttctctcgcctcttgacgagtcgctctcctcttcgtccaagcttctcaagtcgtatatccatccgacgctcctcgcggcaggaaagatcaacggcagtacatacgctatcctcaataaccatccggtcggcgagtacaccttcatgctcctcaacaaggaactgatggataagtactactacgacgcggacgacttcaagagcttcaatgacgctgttgatttcatgcttgaggtcggcaacgacaccaacgtgactccgtttgagggcgatatctctccgatcggcattcattacttcacggcagacggctccgagagcatcgtcggcaatatgcttgatccttccgctgagctcggcaccaacggcggtccgaaaaatctcctcagcatcccccgctggaagaagtacctcgtcgcggtcaagcagcttgaggagaagggctacatcggcagcgaaaccatcaaggaaggcgacaagttcgcgtgcggtatcataaagggcacctacgctgacgtcgcggctttcgaggatgattattacgtcaacgtgatccagaacccgcaggctatcaccgagaacgtctatgagggtatgttcgcggtcagcaagtacacgaagagcctgtcccgttcgatggagatcatcacttatctcaacacgagaagcgacctcagaaacctcttcgcttacggtatcgagggagtcaactacgagctcgacaaagagggcgtcgtcaagaagctcaacaacgactacaacatgaagctcgagtacacgggcaatatgttcgtcgcttacccgccggaaggcagcactcccgacgtctgggagaacgctaagcagcagaacctcgacatggtcaagagcccgtacttcggtttctcctatgacgagtcgaaggtcgacccgaagcttgtctccggtgtcaagtccttaagcgacaaattcttcagcgcgctgaacaatcagaccgccgctaccatcgaggatttcctcgctgagtggtgggataccgctgacgccgacacttcggtcaagaacttcaccgcaagcaaggacactgacgagaaggatgagtatgagccgatgggcaagatctacgcagactggttcgcggcaaacgccaagaccagtgaggaatga

SEQ ID NO: 2604 - DNA, 1599 bp, Unknown
  Unknown gut bacteria
atgtataacagtctttatttcaagataatcctgatacttgtgatattcatgataacggtcatgtgcgttatcggcacggtgcttataaacagcgtgaacagtttctatatggacgagttttcagaccagatggacaggagcttttcgccggggggacagctgacgtcggagctgactgacgctctggggtcggaggatttcgcggcggagcagtacagtatacttgattcttaccgcggtgtgctcgggatagatgattaccgggatttctatatacttgaccggaatggcaatttccttgagggttcggattcgcagagcgggaagacgctcaggaagaccgcgaatatgctggcggctatgcgcggggaaccggagaataagcagccgctcggttcggatttcgcggatttcgcgctgccgcttgataacggaacgaggagctgtcttatctacgtcaaggatactatggaggagatgcagcagttcacgtggcggctgttttcgataattcttcaggcgctgatgctcgggcttatattcgcgattgtgctggcgtttttcctgtccaaggctataacgtcaccgatacagagcctgacgcgaggagcgaagtatatcgcggcgggagagttctcgcatgagatcgacgttcattcgcatgacgagatcggaacgcttaccgataccttcaattacatgaagaatacgctgaagagcacgctcgaggaggtctcgggcgagcaccagaagctcgagacgctgttcacttacctgcacgacggtgtcgtcgcttttactgaggacgggaaggtcatgcacataaaccagagcttcatggatttgctcgggaataagtatgacgacgggtttgatctcggcaggcttcttctgctgttcggcgtcgatttcccggcgaagaccggcgacgctaaggatataccgaaggacgggtacagcgtgagcgacgtgatgttcgacggtcgggtgctcgacgtcaacttcggacggctgcgctatacggcggacaattcgacgcatgacggcgtgctcgcggtcatacacgacgagaccgggcggtatgagctcgataaatcccgccgtgagttcgtcgcgaacgtgtcgcacgagatgcgcacgccgctccagagcatacgcggcgcgtgcgagacaatactgaacgacaaggagatcccgcgggacatggaggatttctttctccacatggctgtggatgaatgcgaccgcatgacgcgcattgtatctgatcttcttgtcctgtcgcggctcgacaataagcgtaccaagtggaatataaagccgttcgacccggattcggtcctcaggcatatctccgaggtcatgaaggtcgacgcggcggcgcattcgcatacgctgacctatacgcgcaccgaggagctcccggctgtcaccggcgacaaggagcgcattgagcaggtcataataaacgtgctctcgaacgcgataaagtatactcctgacggcggaaagattgagatgatcgcctctccgacaaggcgtggaaaagcgattgacggtatcagcgtcatcgtccgtgacaacggcatcggcattccg

SEQ ID NO: 2605 - DNA, 1644 bp, Unknown
  Unknown gut bacteria
tacatggccgaacacggcatcgattatcagctcttctgctggtacagtaccagtatgacagacccgataaagacgccgggtatgtatcaggctctccacgatggatatttcatggcgcggtacagcgacaggatgaagttcgcgataatgtgggaaaacgcaaacgccacgcatcccggatcgagcgacaatttccggaacgtgatcgtcccgtactgggtggaatactacctgactgacccacgttatatgacaatcgacaataaacccgtgataaccgtgttctcagtcggcgacctgctgaaggacttcggaagcgccgagggagtaaaggctgagttcgactatctcagagacgtctgccgcgggctcggatacgacggcgcgattatcatggttcaggcggcaacgactgacggcagcacgctggcgacaatacgcgagttcggagccgacgctacctacgcttacaactggggaaaagcgaacacctctttggaatatgagaactatgtctccggacagttcgcctccggaacgaatacggtcgcgacgatatcggtcggcttcaacaacgtcgcgtgggcgggcacccgctcctcgctgattgagccggacgactacaaaaaggctctcgaatgggtcagggatgatttctccggcagatatgacaaggactcctggctgtcgcgttccgtgatactctccacctggaacgagtatggcgagggaacgtatataatgccgtcgcccgcgctgcatggcttcgattatcttgaggcggtgcgcgaggtcttcgccccggacagcggatgtgagaaccttattccgaccgagagccagctcgcgcggctcagtactctgcgtgtccagtcaagaaagatcctgcgcgcggattacagagttgaaagcgctgattactcgggatttgaggctataaaggcctgggacttcaaaaccggcgcgaacggctgggcacagggcttcggtctgcgtgagttcagcggttccggcggagcgctctccggcatatccggcgctaacgattacagcgtcatgtcgccggataatctcggcattgaccttaccggagccggcgcgctgcacgtgcggatgaaggctgagaaggcggcggggacacttcagatattcttcacaaccgatgaggataacaactgggacgagaagaaatccttccacgtgcaggtatcaaaagccggagagtatgtggattactggctccccacaaccggcaacgccgccttttccggcaagctgagacgcctgcgcgtcgatcctcaggatatacctgagagccgttttgagatagaactccttgaagtctccggaaagagggaacggctcacgcttgaacgttcagacggagccgtgttcagcttcggcaggtacgaaccttatttgtcggatggcgagctgtatatgccgttcgacccgaagaccggactcctgacattcttcggatgcggctacgactggttcccggagacccggacgatactcgtgcgccgcggcggaaagtcggtgagctacaccataggcaaggatatagaagagatggacggccttcctgtcatcccgttcggcaggctgactgacgacttcgggatcaatgacattgtgata

SEQ ID NO: 2606 - DNA, 1692 bp, Unknown
  Unknown gut bacteria
atggacatacttgaaatccgcacgcttctgcggacaaaacctatttatgacattccgatgcgcgtgaccttctatgccagagtttcctcggacagcgacgagcagctgaattcgctcgacaaccagatcgcgtactacgaaaatttcataaagaaaaacgaaaagtggatttttgtcccaggctacatcgacgagggactttcgggaatctcgaccaagaaacgaaagcatttcaacgagatgatctctgacgcgaaaaccggaatgttcgatctcataataacaaaggaaatctcacgattcgcccgcaacacgcttgactcgcttcaatacacaagacagcttcttagcatgggcgtcggcgtgttttttcagaacgacaacataaacaccctcgacgaggacgccgagcttcggctcacgataatgtcctcaatcgctcaggatgagcttcgcaagctctcaagccgcgtgaagttcggtcatcagcaggcgataaagtcgagcgtagttctcggcaacagccgcatattcggctataggaaggacgacaaacggctgataatcgacgagactcaggctccgatggtgcgcgacctcttccggctttattcgaccggacagtacagcatgaagcagcttgaaaagcgcttctatgacgagggctaccgcaactacaacggcaaccggatttcgcacaccacgatgtccggcataatctcaaacccgaaatataagggttattacgttggcaacaaggtgcgcgtcgtcgatatgttcaccaagaagcagaaatttctgccgaaggaagactgggtgatgtacaaggacgagacaggcgagattgtccccgctctggtctcggaggaaatctgggaacgcgcgaacgaagttcttgcgcgccggagtgaggatgtcaagaaccgtcagggtatctgcaatcacgcgaatctcctgaccgggaagctgttttgcacacattgtggaaagccctactaccgccgcgagtcgaaggacaagcatggcaatgtcaactcgaaatgggtctgtgccgggaagataaacaacggcgcggattcctgcccgtcattcccgatctacgagtcggagataaagccgatactgctcgatgtgttcagcgcgacgagagtcgacaccgaggcgatgctccggagctacaccgagatgttccgctcgatggagaacgacgacgaaaccgcgattaagatcgaagagctcaaaaaaactatcgcgcttgccgggcaaaagaaaaacaagctcctcgagcttgtcacgtttggaacggtcacagcggcgaacttcaaatcgatgaccgacagctgtgaccgcgagatcgacgaggcgaacgctgaaatcgccgagcttgaaaagctggtctttaccaaggacgagtaccgcaggcatatgtcagaggtcagaacgagacttgacgcggcggtccgcgacgcggcggacggacttatcacgaacgagttcgtcgcgcagtatatcgacaaaatcatggtcacaataacagatgatgatacagcgaacctgaaaatccgcatattcaccggaaaaagcaccgaaagatggctgagtaacctcgcggaacgaagtcagagtcgtgcgggtcacacgttcaagaagatgatcgagaagtacgagaacgacatcaaggcatccaagtaa

SEQ ID NO: 2607 - DNA, 1179 bp, Unknown
  Unknown gut bacteria
atgatcgagctgtaccacccgcagtcgataaaggacatacaggaaatgctgaaggatatgttcgccgacacaatggaggatatgctgaaagcggagcttgacacagagctgggctacagcaaaaacagtcaggcagcgaaaacgactgaaaaccgccgcaacggaagctacccgaaaacggtgacttcaagtatgggagaaatcgaactcaatattcctcgtgaccgcatgggagaatacgatccggagcttatccccaagggaacaaaagacgtcagcgcgcttgaggaaaaggtactgtcgctctatgccaaaggaacgagtgacagggatatttccgatgtgatcaatgaaatctacggcttctcactcagtcacgaaacgatctcgaatattgttgatcgggttcagccacgtgtcatcgagtggcagaacagaagactcgataaggtatacccattcgtatacatggacgctcttatggtaagcatgaaatcagagaaaaaagccggaaaatatgcggtttacagcatgataggcgtcaactgcgagggtaaaaaggactgctttggtttctggatcggtgaaaacgagggaacgcaccgctggcttggcatcttcgatgagctgaagtcccggggagttgagaaactcggatttgtctgcatcgacggactttcaggtcttgaagaggcgataacgaacacgttcccgacagctgttgtctgtcgttgtatggtgcatctggtcaggaacagtacgaagtacataccgacgaagcacaggaaagagttctgctccgacctcagagctatatatggtgctgtcagtataggcgaagctgagaatgcgcttgccgtattgaatgagaagtggggaaagcagtacccttctgccgtcagggtctggaacgacaattttgtctacgtccagaggctgttcgagtaccctgccgagatacggaagatgatatacactaccaacgctatcgagagcttcaattcggcacttcgcaaggtcacagaccgtaaggctgcttttccaaatgagatggctgttatgaagatactatatcttcgcacgctggatgtggttaaaaaatggacaatgccttatccgaactggagccttattcgtggaaaactcgacttcctttggggcatgggatgggatttatga

SEQ ID NO: 2608 - DNA, 2190 bp, Unknown
  Unknown gut bacteria
tatggcgaattcggtcggcggttcagcgttgacataaaacaggattcatcgtgcgacgttggagacggattttttgccgggcagctcgcggagctcgagaagcaggcgcgcagtgcgcaggtcgaactggctcaccagcgcgcttttcgccatgaaaacgatgagcagacagttgtcgaggaaacgccggacaaggatttcgagcggatcgcgactctgtccgcgaaagacgtcgtttgcgagcaaagtgaaaataattttcatattggcgggaaatattttgatgtatcgtctcccgaattcataatcggcgacgaatttcagatcgtggacccgacgccgatacgaaatatcgatggtccgcgaaaaaatatcgttgttctgggcgaagttttcggcattgaatcgaaggaaacacgccgcggggacaagctgattctgaccttcgcggtcacggacaaggattcgtcgatctatatcaaacttgtttctactaaagaagagctcgagccgtacctcacgaacatcaaagaaggaatgaccatcgcgatctacggctactcgaaaattgacacattcgacaaagaaccagtgttatatccgaatgcagttgcaaaaattaaacaaaaatatcgcatggataacgcgccagaaaaaagggtagagcttcattgtcatacacaaatgtcgtcgatggacgcgataattccgccgaaggagctagtccgccgcgcgcacgattggggtcacaaggcagtggcgatcaccgatcacggcaacgttcaggcgttcccgctcgcgatggatgaggcggagaagatcggaatgaaggtcatttacggcatagagaactattttgtcgacgatacggcgagggtgctgtatggcgacaatcttgaaaattttcttcaaactgactttgacgccgagtactgtgtgttcgacatcgagacgaccggtttgtctccgcagagttgtaaaatcactgaaattggcgcggtaattgtcaaaaaaggcgaagttattgataaatttgacacattcactgatccggaagtacatattccggagaatattaccaaacttacgagcatcaccgacgaaatggtggcgggtgcgccgaagaacgcagacgctgtgcgagagttcctgaaatttgctggaaatcgcattcttgtcgcgcataatgcatcatttgatacgtcgttcatcagaaaagtagcacaggataaccaaattgaattcacggtgccgtatatggataccgtcgctttgtcgcgttacgcgaatccggagctgaaaaatcacaagctcgacacaatcgctgagtacttcaatctcggggattttcaccatcaccgtgcgtgcgacgacgcggaaatgctcggtatgatactgataaaactgttcgacaaaatcaaaaacgagggcgcaagcaacctcgcggagatgcagaacctgatgtccgagcactccgacccgctcaaactcaagccctaccaccagatcatcctcgtcaaaaaccttgccgggatgaaaaatctgtacaaaattatctcgaaaagttatcttaattactacaaaaaagtaccgagaactccgaaatcgttaataaccgagcatcgcgaagggctgatcatcggctcagcttgcgaggctggagaactgtatcaggcaatacttaccaataaaactcaaaatgaaatagaagaaatagcaaatttctatgattatctcgaaattcagccgctttgcaataaccaatttatgctcgataaggaaatcgttaacagcaaagaagagctgatggagatcaaccgaaaaatttacgaactcggaaagaagctcggaaagcccgtggtcgcgacctgcgacgcgcattttttcgacgaagacgacgaaatcacgcgaaaaattctgctcgcaggacaaaaatttgcggacgcggaccgcgatgtccatctttttttcaggacgaccgacgaaatgctgaaagaattcgagtacctcggtgaggaggcggcgcgcgaagtcgtcatcactaacacgaacctcatcgcggacatgatcgaagacccacgaccaattccgaaggggacttacacaccgaacctcgagggctcggaggaagaattgcagcgccgctgctggacccgggcgaaggagctttacggcgacccgctgccggag

SEQ ID NO: 2609 - DNA, 2586 bp, Unknown
  Unknown gut bacteria
atgttcccgcgcgtccggatgcgcgcggcggaacttccgtctcatccggaacgaggtatacgcttgaataccacatcgaaccgcttcgcgctcattctgcccgagagacagacctgtcccggcggatggtacgcggtcggatatatatcgcgcgccctgcttgtattcatgtgcacgttcgggttcgctctgttcatctgcgacgcgctggcgctggggaacggattcacattggttatgacgcttttcggaatcagcgcgctgttcacgctggtgttctccgtcatggggctcggaaggatcaccttcgccgccgggtgcggactgatcgcggtcatcggagcggcgacggctctcatgaccgaacgcgccgcagaaaaggcatattatctggcgctggctctgccgaacgcctttttccggagactcgactcgctcggctatccgggaatgagcgagagggttatcagctacgagtatccgcttagaaggctcggaatgcctgagaacgagtgcgtcttcgtcgcttttgccgtcctgctctttatattgtgcgccgttttttcggtttgtatgctgaaaaggctgagacttatacctctcgctgttatcggcggatcggtctgcacgatatgcctttattacggtatgtgtacgaagaacgtcgggttcgggttcatcatcgcttctctctgcggctgtgccgcgctcgccggatacgaccatatctacacgagaccgaagacgatcggagcggcggttgacgctgagcttcccgaggacgcgacaatttcggaatggaaggaagagaagcggcgggttctccggcagaactcggggctcggtggtttcaccgggctcgcggcggcgctgacggcgctcgttctgctgatcgttccgatgacattcaaaaacagcatgaaagatatcccgtcgctttcgacaccgcttctgaagcttgagaattacctgtattcgcttgcgcgcggggacagtccggatttctcgagcctgatattttccggcgtttccgcgctcgacaagcgcacgacggcgtcgtccgaccgcgtttacaccggtacgagattgtttgaggtgcaggttgacacgtcgctgccggtgtatcttcgcggttgggtcgggaccgattactacggggacagctggcactcgctcgattacgacaggatcgcggaatacaagcggcttttcggcactgacttctcgccggacgagatgaccggggatatgctccgcgctgttgatccgtcactcacgacggtcggttccgcgggatacagaccgcacaccgacctcggatacgtgacggcgcgggtcagcgtcaaaaagctgaagccgacggcgaacgtcgttttcatgccgtcctacaggctcggaaaaaatcagctcttcgccttcggaagtttcgatgagggcgacgtggagtactcgaattacagcgacggaatattcctcagtacgtcctatctcttctccgacgactattcggtcgtctcggacataccgctgctgcgggatccggagttcgccgggaatatcggcagtttcgtgcagaattacagacgggagtcgaggataatatcgacgatctcggcgtacggcaacgattctgcggacgggctcaggcgcgcgtatctcgtgaccgtgcatgacgtcgtgataagcggcaagggaaccctcgtctggcgggacggctcgctcgacattgatctccggagcggctcggacgcgccgcagaaggatcagatcctcgccgctgccgttttgcggctcgacaaaatgaccgatgagttgataagcgaggatgagaaggacaacctgtcctaccgctacgcgtttgttatggatgaggaggagcgcagggatatacgcgcccttatcagtgtggtcgcgaaatatcgtgagtacgcttatcagaactatctcacgggttgtgagaattataccgcgataaagcagctcgcctcggacgtcgtttacggtccgacgaccgtcgacaagaacagggtttatgtcgacacgcgcagatacggagatatggacgagtacacggcgagacatatgatggttatggcggtgattgactatctctcggagaatatggtctacacattgtctccggttgacccgtcgccgacaagggattatgtcaacgcggcggatacgttcctctttgacacccaggaggggtactgcgtgcagttcgcgacctccgccgtcatgatgatacgctcgctcgggataccggcgaggtacgcggaggggtatattgcgagcgatttttcgagaaattccggcggcgacgccgtcggaaagtattcgtctctggtgctcgacaacaacgcgcacgcgtgggttgaggtatattacgacgattacggatgggtacagtatgaggcgacaacgccttactattcggagatgtacgaggggcttgtcccgacggtcgatgaggtggagacggatgttgttccggatgacacaacgcaggtgacggatgtggtcacggacagcgagacgaccatgccggaggatacgacggctccggacgatgagattgtcgag

SEQ ID NO: 2610 - DNA, 1494 bp, Unknown
  Unknown gut bacteria
atggttatgagcaggattcaatctggtagggtaacggcgataattcttctggcgtcgtttcttatgtcatgcggaggaaaagcgggaggagagaaggaaacatccggcgctgacagccgggctcaggaaagcacggagactgccgccgccgctgaagagtatgtctatcccgacaagagctacggcggttatgagttccggatactcaatttcaacgagttctggagctgttatgtgcgtgtggacatcacggagcagaccggcgaggtagtcgacgacgcggtgtggaagagaaaccgcgggatcgaggacaggttcgatatacatatcagtgagatcacggaggcgttcaatgacggaggcaacgccacgggtgtcacgaagctgctgagcagcgcggtcatggcgggggacgacgcgtatgatgcggcgtttcttccgatatcctacgcgcccggcgtcattacagagggaagccttgtggatctcggcagtatcccggagatcaaccttgataaggattggtgggataacgtgctcaattccgaaatgtggctgaacggaaagctctacgccgccgccacgcctcttcagcttacgtcgctcgatcttacatgggtgctgctgttcaacaaggatatgctgagctcatatggtcttgagtatccgtacgatacggtgcgtgaaggcaagtggacaatggacgagatgaacacgtatctgacgaagatcacgaatctcaacggcgacgactcgttcaagtacaacgaaaaaggcaacgccgtatacggcatcgcgggacacgacacgggaagctatatgttcctggttggcggcggtgagtatttcataaagcatgacgatactggaaatctggtgtatgagagtccggatgaccggttttacgaggttataaccaaggtcgcggaggtgtactcggcgaaggatggcaaggttctggtgaattcgaatgacaagttcaccgacgcgggcgggtactacaatctgttctactcggggagagcgggcttccttacgaccgagctcaagggcgcgaaggtcatgcggagccttgagacggattacggcatacttccgtctccgaaattcgacttgaatcaggagaattatataacctatgccagcgagaatatcgtgcgctgcacggttccggtcactgtgagcgatctgtcgcgtaccggcgtgatccttgacgcgctgtcctatgagagctatcgggatgtcctgccgctttattacgggcagacgatctctcagaagggtctgagggacgaggattcgattgagatgctgagtatcataaacgagacgagagtcagcgagtcgggtctcatattcggcgtgacgtccgggctcgtgaacgcgctgaaatcctcgataaaggacggaaaggacgattacgcgtcggtggtcgcgaagaacgaggagagcgtcagacagaagctgacgaagctgctcgaatcgattgaatga

SEQ ID NO: 2611 - DNA, 1416 bp, Unknown
  Unknown gut bacteria
ttgaaaatagactggaaccggaaatacaccacaatcgccgtttatgccgggctcaccggggcggcgctcatcgcgctcgtgttcgcctttaagaacttcgagttcttctcgggctggggaaagcgcatttccgggatactgaaccctgtatggctcggaatgatcatggcgtacctcttcaacccgatactcaaattcgccgaaaagcgaatattcaggtggaacgcagtcacgaagcgccagcacagctcaaagcgcgcgctcgggctcatattcacgtatatcgtcgtgctcatcattctgacgatcttcctgcttctcgtcataccgcaggtgtacgcctcgggatccgacctcgcgtccaagatgagcgggtatatcgagcagaccctcacatggataaacgagttcctgtcgaagtcaaagttcatcggcggtgatatcaacgacctcgacgacgttttcaataaggcgctcgaaatattcaacctcaacatggaaacgatcggctcaaagattcaggagcttatcacgaactcgactaacctcttaaaagactacggaccgaaggtgttcgagtacttcaagggcataacgaacggattcgtaaacacgatcatcgggctgatcttctcggtctacttcctcgcctcaaaggaaaagcttacggcgcagataaagaaagtcctccgctccttgacaagcgaaagactttataacagtactcttgagctcgcgaacttcaccgacaagaccttcggcgggtatattaccggaaagcttctcgactcgctgatcatcggtatcatcatgttcatcgtctgcgcgatctgcaagatgccgtacacgccgctcgtcagtgtgctcgtcggagtcacaaacatcattccgatcgtcggaccgttcatcggtgccattcccggaacattcatcatattcatcgtcgacccggtgaaggcgttctggttcatagtcatcaacgtcgtcgtgcagcagctcgacggaaacgtcatcggaccgaagatcctcggtcagacgaccggactttctgctctgtgggtcatgatgtcgatcacgataatgggcggtctgtggggactgttcggaatgctgatctcggtaccgatcttcgccgtgctctacacgctcgtcaagctcgcggtcgaaaagagactcgcgaagaagggcgcgcccaccgaaaccgtcgaatactacgccgccgtggaagaccggacgctcagcgaaagcgacgacgagccgaccttcgcggaaaagctcaggaaaatgacagccgatatcgccgagaaccacttcggtcagagattcagaaagttcagggcgaagcgaaaagagaaaaaagccggcaaagacaaagcaagcacggagaataaagaagacacagagaataaacagtaa

SEQ ID NO: 2612 - DNA, 1560 bp, Unknown
  Unknown gut bacteria
cggactcttcaggacgcggaggacctctctcaggagatcgccgccagatcctttgccgcgctgttgaagagagacgatatctcagatcccgacagcttcatccgcgccgtcgcgcacaacgcgctcagcaattactatcgagacagcgcaaacttcatggtcggggttccgctcgacgaggttgccgaacttgttgaggacccggacgcggagataaacattgaggacgacaccggaatattgaagaaacttcgccgcgagatcgcatatctgtcaaaaactcagcgtcagatcgtcatcgcgtactacttcgagaaccgcaggcaggcggacatcgcgaaagccctcggtatcccgctcggaactgtcaaatggcacttgtttgaggcaaaaaaagaacttaaacgaggtatcggaaagatgagaaacacaagcgaactcgggttcaacccgatcagattcagcgcctacggaataaacggctccaccggaacgaagaacaccgaagacatgttcagatccgtactcactcagaatatctgctactgcgtcaggaacaccgcgcggtcggttaatgaaatcgcagacgccctcggggtttcgccggtctatatcgagagcgaggtggcgctgcttgaggaaaacgggtatctgcgcgagaggaacggaaaatacgagactactttcattatctcggagccttcaacagagctgttgaaaattcagaacgatatgtacaggcacgctgcgggaatattcgcgaacgagctttttgacgagctgacgaaatccggcatacttgatgccccggacattgtctgccggcagactgacgagccgatctctcttgaaacttcgccgtcggcggacaggaatttccttctctggacgctcatcccgtatatagccgcctgttccggcgagaacgagagaaagagtgcgagcatatcctttgacgaggtggcgactatccgcccggacggcggaaaaaacatattcaaggcagacgtcatatccacggataccgtctatccggacaatttcgtctacatgaataactggtgcggcccgatgtggaacagcagcggaagaaacatactctggcagatcaacagcgagtggaccgatcacgccataaccgtcggctcgcgttatgccgaggattccatgcgcgtcctgtcactctatgaacgcgaggaggacggacctctgtcgaaggacgaatatgcgtggctcgcggaaagagggtttatcaagactaatggtgattatgacgggaatttcaagtcctcatggcaagttgtacttctcacgacaaaggagatcaacgaacgactcgtcgctttcggcgaccagataaaggcaagacaccgggacgagttcgacctgatgaaaaagcagtactccgatgcggttctcgccggggttcctgagagactgaggaagattgcggagtatgagcttcagtatgtgttcaactgtgacgggtggttccttctccactgtatcaccgctcttcttgagaacggcaagctgaaaccgccgaccgagggacagaaa

SEQ ID NO: 2613 - DNA, 1203 bp, Unknown
  Unknown gut bacteria
atgacagacggcaagcgagagatcatctcgagattgatcgaggaatatgacataaagaccgcggaggatatacaggatgctctgcgtgacctcctcggcggaacaatccaggggatgatggaatgcgaaatggaagcgcagaaagaggaacatcaggcatccgatcccgaataccatgactcaagaaacggttacaaaccaaagactctacgctccaactacggatctgtagatatccgtgtgccccaggaccgcaacagcgattacgaaccgcggatagtcccgaaatacagccgtgacatctccgaaatcgacgagaaaatcataagaatgtacgccagaggtatgtcaacaagacaaatctccgaccagatcatggacatctacggtttcgaggtcagcgaagcactcgtgacagatgtaaccaacaaaatcctgccggaaattgaatcctggcagaaacgtccgttatgcgctgtataccctatcgtttatatcgacgctatagtattcaacgtccgtgacaacggcatcatacgcaaacaagcggcatacgttatcctcggtatcagcgaggaaggacacaaggaagtgttgtccataacaattggtgagagcgaaagcgcgaagttctggctcagtgtactgaacgagctcaaaaaccgcggtgtgaaggacatattcgtgctctgcgcggatggacttaccggaataggagacgccatagcggcagccttcccgatgactgaataccagcgatgcatcgtacatatggtgagaaacacgctgaaatacgtggctgacaaagacaggaaagaattcgcgaacgatctgaagaccatctatcacgcgcctgatgaggaacaaggataccggaatatgcaggttgtcgctgagaaatgggataagaagtatccgagatctatggatcgctggaaggataactgggctgctgtcagtccgatgttcaagttttcggatattgtgagacgggtgatctatacgactaacgcgatagagagccttaacagtggattcaggaggcttaacaggtcacggaatgtgtttccggacagtaaggctttgctgaaggcgctttatctggctgctgacaatattacgaagaagtggacgaatacgcttcgtgactggggacaggtctatgctgagttgtctgtgatgtatggggaaaggctcagctga

SEQ ID NO: 2614 - DNA, 1728 bp, Unknown
  Unknown gut bacteria
atggatacaaatgagtacagcacgaaaaaaatgcggctcgcgaccctgaccgccgtcgcgataatcatcacggtcgccgctgtggtcgccgtcagcataattccgttcgtaagcatatacagcagcaccgtggagtcggacgccgggatggcgctcgagcagtcggcgagacagacgacgatggctctcgggaaccttatcgacggaatggagggcagactgctgaacatatgcagagaggtcaggaagagcgaggacatcactgatcttgacgacagactgtccgtcgcggcgcggctcgaggagtcgatcgaggcgatatgtgtttacgacatggaggggaatacgctttctgtcggaggctccgggcatgaactcaaggatcagtcgtcgataaatctttcgtatgacggagagctttttgggagcgctgagaactttgccatatcccttccgcacgtccagacgctgttccgcgagtactacccgtgggtcgtgacgatagcgcggcgtgaggaaggcgcgcttaacggcgaggacgtgtatgtcgcgatagatttcaggttctcggatatctccgggtatgtcgacaatataggcataggcgcgcacggctattgtttcataattgacgccgacggaaatctcgtatatcacccgcgccagcagatgctctactccggacttataaaagaggaagtgacgaggctcaccggcatggacgacggcacggtgcgcgacgggaacgtgatgcgcacgatactgacgctcgacagcaccggatggagggtcataggcgtcagctatcttgacgaggtgaacgcgacgcgggacaggacactttcgagcgttctgctgacgacgcttctctgctgcgccggggtcgcggtgctgatcgccgtgatcttctcgcagataataacgaagccggtgaaatcgctgatcggcgctatgcgtagattcgaggagcacccggagaattaccgctactccccggcgccgatacacattgccgagttacagctcatttccgactccttcggtcagatggcgtggattgtccagtcgctgatggagaagacaaggaacgaggaggctcttctcaggaaaaccgagctgaaggcgcttcaggcgcagatcaacccgcattttctctacaacacgctcgactcgatacagtggatgtgcgagcgcggaaagaacgagagcgcggtcagaatggtcggagcgctcggcaagctgttcaggataagcataagccgcgggcacgagctgataccgataagggacgagctgaagcacgtcgagagctatctgataatccagaagtaccgctacagcgaccgctttgagtacactttcgacgtcgacgagagcctcggcggatatctgtgcagcaagataactcttcagccgctcgtcgagaacgctatctatcacggcatagagccgctgatcgacgacggcgagatcatcatatcggtaaagccggacggagacgacatactcatgacggtcagcgacaacggcgtcggcatgacggcggagcaggtcgagggactgctgaaaaaagagcgcagcgactcgagcggcatcggcatcaagaacgtgagcgaccggataaagatctacttcggcgacagctacggagtcaaggtcgagagcgagcctgacgtcgggacgaagataacggtcagaataccgaagataacaaaagagccggattga

SEQ ID NO: 2615 - DNA, 1686 bp, Unknown
  Unknown gut bacteria
atgaaaaccggcaaaatgattctggctttcgcgtatctgaggctttcccgcgaggaaatgcaggcgtgcgaatccggaagtataaagaaccaaagaatgataatctcggactattgcaggcagaacgacattactctcgtgcgggagtttgtggacgacggatggtcgggcggaaattttgaccgcccggcgtttcaggagatgttgcggcagctgagcgacggttcggcgaacactgtgataactaaggatttatcgagacttggtcgtgatatgcgcgagtcgagctattacgcggagcagtttttccctgagaactgcatccgctatatcgcgatcgcggataatttcgatacggagcatgacaatataatggcgcctttccagttcgcgatgaacgaggtctacctgcgcgacggttcacggaaggtcagggatgttctgaaaaacaagcgcgagaatggtctgtactgtgcctgcccgccgtatggttaccgcaaggacggcagaaataagaatcttcttgtcccggatgaaatgacggcgccggttgtacagcgcatattcagaagcgcggctgatggcgattcgtcccgtaagatcgcgcttgatctcaacagggatggtattattccgcctttgaagtatcgggtcctttacagggacgatttcagcgatgaaggggcgctccgtgcgtcggacgtgtggaattacacaacggtcaagcgtattctgaaaaaccgtgtctatctcggacacacaattctgggtcggagccgcaaggtcagcgttaagtcaaaaaagaaagtaagtatccctgaggaagactggatcgtaacgaagaacacgcacgaggcgcttgtcacggagaatgtatttgagcgcgcgcagaagaacctcgggaaggggacaaagaggtttcaggacagcgggcagttccggaacagcatattcggagggattgccgtctgcgaaaggtgcggacacgcgctgtgttcggcgggaactgtctacaagaatgagcgtaaaaagtactggtatctcacgtgtactcacaagcggtcggatatatcaaacccgtgtgaaggggtgcgaatcagatattcggatcttattgagatcgtgagacgggatctcaactcgctgatatcctttactgatgaagagatacgtgtcatggtcgaggacattataaaaacaaggactcagggggtggatgccgaggcggcaggaaagcagaaggaaaaagccgtggcgcgtcttgagacgatcaacaggatcatcacgaagctgtactttgataacgccgagggaaatcttgacgatgacagactgaaggctatggtgtcagaccttgagactgagtctctggggctcagaaagactatagaggaactgagcggaaatacgggagatccggcggcggagatcggggaaaattacgcgcgttttttcgcgctcgcgagaaagtatacgcatatagaagtgctggaccgtgatatattgcagacattcgttgagcggatagaggtcggacccaaggagctgccggatggtgtgaagcatcagtcgaggaagaagcctgaatacaggcagaatatccggataatatacaaattcataggcgagcttcaggacaagcagcctataggcggcttgcccgtgacggacgaaaaagcagagtga

SEQ ID NO: 2616 - DNA, 1563 bp, Unknown
  Unknown gut bacteria
atgctgtcaaccgtatattcatccggcatctccggtattaacggattcgtcgtgacggtagaatgcaacgcgagagacaagattccgacgttcgatatatccggtcttcccgacgccgccgtcaaggaatccaagaacagaataatgtccgccttagaaaacagcggcttctatgaaccggaaaaggcgctgaccatcaacctcgcgcccgccaaccgtaagaaagaaggatcctcatacgacctcgccatactcataagcataatgaaagcgacgctgatgcttccgcttgaactcgatctgcgtgactgctgctttataggcgagctgtctctctccggagagatcagaccggtaaacggcgtgctctgtatgaccatagccgccgccgagcacaatctgcgccgcgtgttcgtcccggcacagaacgccggagaagcgtcggtagtccccggggtgagcgtttacggtgtcggcagcgtaacagaactgtgtgatttcctcatgggcagaaagcgcattgaaccgaccgtatacgacaaatccactttttcggcggaatccacgtcatacccgatcgatttttccgacgtcaagggacaggaaagagtcaagcgcgcgctcgagatcgcggcggcgggcggacacgccgtgcttatgataggtcctcccggatgcggaaaatccatgctcgcgaaccgcataccgactatccttccggacattacgttcgaggaagcgattgagacaacgaaagtatactcgatatgcggcaagctcccggaaggcgtaccgctgataacaaggcgtccgttccgcgcgccgcaccatacgtcgtcagccccgagtcttgtcggcggcggcagcattccacaacccggcgagatatccctcgcgcacaacggcgtgctgtttctcgatgagctcccggagttccgacaggatgtgctggaggtactccgccagccgctcgaaagcggcaaagtcgagatttcaagagtcaacggaagcgagacatttccgtgttcgttcatgttcgtcacggccatgaacccatgcaaatgcgggaactacggaaaccctgtaaagccctgtacgtgtaagcccgccgacgtcaaaaagtaccattcgaaaatcagcggaccgcttctcgaacgcatagatatgcagatagaggtcaacgcgctgtcgttcaacgatctgtctgatacggatcgccgctacgagtcatccgcggaaatccgcgccagagtcaacaaagcgagaaaattcgcgatagagcgtttctggtccgccgcggaaaaggacaagtcattaaccccgatacgcttcaacgcggcaatgaacgatcggcatataaaccgtttctgccatcttgacggagacgcgcttgcaatcatgcagaccgctcacgaaaagttccagctctccggccgcgggtatgaccggatacttcgcgtggcgagaacaatagccgacctcgcggggagcgagaatatccagaagaaccacatatcagaagcgatacagtaccgcggtcttgagaaaaaatactttttctga

SEQ ID NO: 2617 - DNA, 1476 bp, Unknown
  Unknown gut bacteria
atctcaaagcttctgctcgcggcgatcctgttatcgctcgtatcctgctctgacgaatcgcttccgtcagattcagcaaacgacaaaccgtccgactccgatcagaccacggagactctcccgaccggggagtcgtcaggcgttccggacggcacaaatttcaacggtgaaactatcagcgtctggtacacggccacggcaaacgcgattggcgagtccttcattgatatcgccggggagcttacgggcgacgttctatcggataaaatctacaacaacaatcgcatcgtcgaacaaaatataggcgtcaagttcgatttctacaattcaggaattccgagcaatcaggccggaaataccgtccgcacgctcgtcatggccgacgacaacacctacgacgcctttttcacgatccagtacaactccgcgcagctcgccgttgagggactgtacctcaatgtcagcggcatgccgtatctcagcctcgacaagccatggtgggacgccgattatatgaacgaaatgacgatcggaaacgaggtgatctacggtctggtcggcgattactcgatagaccggacgcgctgtctgagctcgatgttctacaataagaaactcagcggcgatttctacggcgaccctgacgcgatttgcaacgacgtcatagacggaaaatggacgttcgatcggctcgcgcaaatctcggctgaggtatattccgacgtaaacaacgacggaaagccggatcgcggcgacagagtcggatattgtatcaatgattacagcaatctcgactgcctcttctacggaaccggagcgcgcgccacgacccgcgacaaggatgattttccggtagtttcgatcaacaccgagcgcacggccgatgtctgcgaccgtctgtataagcttgtctacaacacaaccggtggatatttccaagggcacgaaaaccgcgcacaggagactttgaataatctggtaaacttcagtgaagacaacagtatgtttctttttggctttttgtacaacgcggatgggctccgcgacatgaagtctgacttcggcattataccctaccccaagctcgacgagaaccaggaaagctatcacagcattacgcacgacattatgcggatcatgttcctcccgcgcaactgcgggaagcccgaaaccgtctgcgcggctctcgaagagctggctttcatcggatggaacgacaccctgcctacctattacaacacgattctcaaaaataaatattcgcgcgacgaatcgaccggtcggatgatagaccttatccgcgatgattgtacagccgacatcgcgttcatctacaatgacgccttcaactcggtcggctacatttacagaacgctgattcagaacgaatcgaacgcattcgcgtcgaccttcgcgaagaacgaaaccaggaccaacgagaaaatttccgaattcatcgaagaattcagcaaataa

SEQ ID NO: 2618 - DNA, 2007 bp, Unknown
  Unknown gut bacteria
gtgcccgccgtggcggtcgcggtgttcttctttatactctacgcggttataacatctgtctcgtctctcgatccttttgtgaccggggcggtcatgacggcgtgccttgttctcgctgagttcttcgcgtcgaggctttacggattcttcagcttccgcgtggcgggaccggacgacgagaagctctcgccggtgctcgggagcatcactctcgatttcatactgaagctgtatatgcctgtcgtcatctgcgacgagtccggacggataatatggtacaacagcgcgtttactaagatagcgaatccgcgcgaggtgctgtacgcgaaatatatcgacagcgtctgcgacgtgacgatcgataagatactcgccgacacgatgtcgatccccgagagcctcggcgatcaggacgcgtccgataacgaggacggcgtgacggctctggcttatgaccgcgtcttccgtataaagggctacaatataacctcacagggcaagaagtatataatcaccgtctggaacgagcgcacagaactccagaggctcgcggcgcgtctcgcggatgaggagacgatcatcgcttatgtgatgatagacaacctcgacgagctgatgcagttcgtgcaggaaaagtaccgcgcggcgtccgcggaggttgaggcgatactcaagcagtgggcggattctgtcggcggaatactcaaggagtacgagagggataagttcattttcctttttgaagcgaggtatctcgatgaattcatcgagagaaagttcgatattctcgaccgcatccgcgaggtgcgtatcggcgagggaagtatgccggtgacagtgtctatcggcatatcgcgggttcgcggaactctcgcggacaaggatcatgacgcgcacgcgtcgctcgatctcgctcttcagcgcggcggcgatcaggttgtcgtcaagaacgcgcataacacagagttctatggcggtcgtacaaaaaccgttcagaagcgcacgaaggtcagggcgagggttatcgcgagcgagctgactctgcatatggcgaaggcgcgcaatgtgctcattatggggcaccggaacccggattacgattcgataggagcctgtgtcggcgtcgcgagactcgcgatgttctgcggcgttaagtgcaatatcgtcgtcaaccgcggggacacgaatatacggagcgcgattcagcgggtggagactctgccggagtacgcggatatgtttgtcgacaatttcgtcggacaggatatgattcatccggatactctgcttgtcattgttgacgtcaataatcctgcgcagttcgcggcgccggatatcgcggcgaatgtcgatactatcgtgatcattgaccaccaccgcaagaccggggattataagcgtcagccggctataacttatattgagccgtcggcgtcttcggcctgtgagctgaccgctgagatacttgagcaggcgctgcctatgggcgggctgcatcgtgaggaggcggatgtgctttacgctggaatgctgcttgatacgaagcagttttcgcggaatactggggtgcgtactttcagtgcggcgctttatctgcgctcggagggggcgagcccggcggaggtgcagtatttctttaagtcggatcttgacgatttcatgcgcgaggcgaagttctcgatgaatgttgtgacttatcgtcagatattcgcgatatccatgagcgacggggacggaactccgcaggacaggatcgcggcggcgaaggcggcggacaagctgcttggagtgagcggcgttatggcgtcgtttgcgctggtccatatagacgacagtgttcatatatcggcgagatcggcgggcaatgtcaatgtccagctgatacttgagaagatgggcggcggcggctactacgaggcggcgggcgcactgcttaagaatgtcacgatggcgtcggcacttacaagcctgaaatcagctatcgacgactacatgaaaaaggaataa

SEQ ID NO: 2619 - DNA, 1308 bp, Unknown
  Unknown gut bacteria
aagtcgttcgatatctttgtcgcgggcaactgggacaacgagtggacggaatcctacgacttcttctcggagggtgagaccggcgacgtcgtgaacgacgctgtctaccgcaggaactccatcatcgaggacaggtacaacgtcaagatcaacgagataaacatccgcggagaggcgagcggcggcaatggtcagggcgcgcagacgatatcgaagggcgtcatgtcgggcgacacttcgtatgacgcggcgatgatcggcacgtatgacgtgagcaacctcgcgtgtcagggttatctgctcgacctgaactctcaggttccggggctcgatctgactaaagagtggtgggaccagaaggctaacgaggacctttcgatgaaggggaagatgtacttcacgaccggcgatatctcaacgcttgacaatgactgtacatactgcattctgttcaataagaagctgattgacgactacaatatggaagacccgtatgagatggtcaagaacaagacctggacgatggacaattttgtctctatggcgagaaaggtttcggttgaccttgacggcgacactaagatgaccgagaatgacctctacggaatgtgtgtctggcaggacggcgtgctggcgtcgataaacgcgtgcggcggggctatatgccgtattgatgacgcgggacagattgagctgacgttgaataatgagcggaatatcgatatgctttcgaagttcatggatcttatcactgacaggtcggtggcgttctcgttatatcattcgggcgaccatatcgagaatatgttcgcgaatgatcaggtgctgttctataacaggtatcttaatgtcgtcaagaagtacaggaatatgaatactgacttcggaattctgccgttcccgctctatgattcggctcaggaggagtattatactacggttcacgcttacggtaactcgttcgtttgcgttccgtccgtggttgaagatgttgagatgaccggcattatccttcaggatatggcttgtgagtcgatgtatacggtgactccggcgtattatgacgttcagcttgagggcaagatgatacgtgacgaggagtcctcggatatgctcgatatcattctttcgacgaggctctatgacataggcgcgacctatcagatcggcggctataacgagaagctgatggatatgttcagattcaataagaaggacttcgcgtcgatgtattcgaaggcggagaagaaggcgacagcggatctcgagaaggtcaataacgcatacgctgacgtaataaatagttaa

SEQ ID NO: 2620 - DNA, 1170 bp, Unknown
  Unknown gut bacteria
atgagcagtatctgggatacgataatcaacagaccgctcggatggataatcgaaatcagctaccggttcacgcataactacgcgatagcgctgttcatattcgcgctggtgcttcagattgtcctttttccgctcggtatcaagcagcagaagaactcggtgaagcaggcgtctctccgtccgaaggagatggcgatacgcaagaagtacgccggacgaaacgacaagccgacacagcagaagctgaacgaggagataatggagctttaccagcgggagaacttcaacccgatgggcggctgtctgccgatgctcatccagctcccgatcctcttctcgctgtataacgtcgtcataagcccgctcaagtatatatgcggattcggcgccgagacgataaagaatatccagctgaaggtctatgagatacttcaggcggcgggcaccgagggttttgaggcgttcgccgagggtaagacggtgtctcagatcaatctcatcacaaagatgcgcgagctcggcctcacgaatttcgtcggtgagaacggacaggcgataaccgagagtatgctcccggatttcactatattcggcggaaagctcgacctttcgatgataccgatacagcatctctggagtatactgcttctgatcccggcgcttactctcgtcgtgacctatggaagcacatggatctcgagaaagcttatgtataacccgaatcccgaggcgcagaacgatatctcgatgaagatcatgaatctttcgatgccgctgctttcggtctacatcagtttcactgttccggcgaccatcggtctttactggatattcagaagcattctcggcgttctccagcagctcgcgctgtcgaagatgttcccgatcccgaaattctcggaggaggactacaaggcggctgagcgtgaggcgaatttcaaggcactctctaagaaccagcagaagaagcagaaggtccgctcgctgcatcacatcgacgacgatgattacgaacagcccgaacagcccgtcgacaagaagccgcagctgaaggacggagtcgataagaagaacgctccggtgctcaaggaggacaagccttcacgcgaggaaaagcaggaggacaagcccgacgataagtccggagaagacaataaggacaataagtga

SEQ ID NO: 2621 - DNA, 1224 bp, Unknown
  Unknown gut bacteria
atgaattccgaattatttgaagcgctcgatatgcttgagaaggagaaaggcatatcgaaggattatatgctcgagcgtgtcgaggcggcgctgatcagcgcctacaagcgcgaccgtaacggtcttgcgaacgtccgcgttgaaatcaacaaggataagcaggacataaagatgttcgagcagaagacgatagtcgaggaagtcggggaccccgagctcgagatcgggcttgccgacgcgctcaagatcaaccgcaagtacacgctcggcgacacctgtgagatcgagctcaagccgaagaacttccgccgcctgtccgctcagaccgcgaagcaggtgatcatccagggcatccgcgaggcggagcgctcgatgatgatcaaggagtacgagagcaagaaggaagagatcatcaccgcgatcgtcgataagatcgacccggagaacgaggatgtccttgtcgataccggcacgagcaaggtctacctcaagaaggcggagcagatcccgggcgaacacttcaacgtcggcgaccatataaaggtgtttgtcaccgaggtcatgaaggagtcgctccgcggaccgctggtctcgctttcgagaaccgcgccggggcttgtcaagcgtctgtttgagcttgagattccggagatacagcagggcgtcgtcgttatcatgagcatcacccgtgaggcgggctcgagaactaagatggcggtcatgagccgcgacgcgaacgtcgacccgatcggcgcctgcatcggaaacaagggtatgcgtatccagagcatcgtctccgagctccgaggtgagaagattgacgtcatcaagtacagcgaggacccggtcgagtatatcagcgcggctctgtcgcccgcgaccgtcaaggaggtcatcatcgacagcgagaagtcctgccgcgtcgtcgtcgacgccgatcagctctcgctcgcgatcggcaaggagggtcagaacgcacgtctcgcggcgagactcaccggctacaagatcgacataaaaacgagagcggctctcgaagaggaggaagcgaagaagcgcgcgttcctcgaggctgccgagaaggagcaggagagagaggacgaggaggacgccgagatcgaggcgcaggcggcgcataaggaggctcatcccgaggaggcggcgacggtgcagaccggagcggaagagacgaccgacgggactgtcggcgacgacgaagtctga

SEQ ID NO: 2622 - DNA, 1140 bp, Unknown
  Unknown gut bacteria
gcgtactttttcgtggtgctcccgctcgtcaattacgtcgaggaggtcacgaaggagacggtcaagctgcttgacggcgaggtgctcggcaccaatgaccgcgttatgctcttcgagaaggaagagagaagcaatatccagtcgatagacgtccacaactccaccggagaatggggcttctactatgacgataaggacgagagcttctatgtcaccggttatccggaggctccgtacgacaaggagaagatatcctccctgttcgtcagctgcggatatacgctttcgatgacgagggtcactgaggattgcgaggatatgtccgagttcgggcttgccgacagcgacaacccggcgtactatacgctgacgacgcgcgacggcaagacgcatacggtctatatcggaagcaagatcccgaccggagccggctattacgtgcgctataagggcagaaacgccgtgtacgtgcttgattcgacgataggcgacacggtgcttcagccgctcgagaatatgatcactccgatgctcgcgctcccgatgaacacgaacgattacttcacgatcaagaatttcgcggtcatgaagggcgatgagatcacggtgctgatcacatatctcgatgaggaggagaaggctgccgaggcggcgatgggctcatataagatgctcgcgcccgcgaactatacggtcaacgactccaactattctgtcgcgctcgagcagctgacgaatttccagggcacgagcactctcgcgtatgatccgaccgaggaggagctgaaggaatatggtcttctcgaaccggccttcagtgtttactatgagtatcagggcgtacagcagacgatagttttcagcgagatgaatgagaacggcaattattatgcctactcgctccttttcaacctgataacagaggttgacggtcacagcatggagtggatcgactgggatctcataaaatgggttgacgagccgatattcatgatgaacatcaatgatgtcaggactatcacggttgacagcgagaccgcgaccagagtattcgatcttgagggcgaggctcaggagcttgtcgtcactgagcgtgacacaggattcaagccggaggtcaagaatttccgtcagttctat

SEQ ID NO: 2623 - DNA, 1296 bp, Unknown
  Unknown gut bacteria
atgcctgaatacaagactaaaagaaacgatttcctgaaagaagaatactacgaatacacgcatgagagcggacttcctgtctatgtcttcccgaaaaagctctcgacatcctacgcgctcttcgcgacgaggtacggctcgatagacagcaggttcaggctcgccggtgacaaggaattcacgacagttccggacggtatcgcgcattatctcgagcataagatgttcgagaacccgaacggcgaggatactttcgaacgtttcgcgagattcggcgcgaacgcgaacgcctacacctcgaccaacatgacggcgtatctgttctcctgcacgtcctgcttcaaggagaatcttgagatcctgctcgacttcgtgacgaccccgtatttcacgtcggagacggtcgagaaagagcaggggataatcgctcaggagatacgcatgtacgacgaccacccgttcagaagtatgtaccagacgctccttgagagcctgtatgagaagcacaatgtcagaataaacgtcgccggaacggtcgagtcgatctcgcatatcacggcggatattctctatgagtgctacagggtgttctataatctgtcgaacatgatgctgatagtctgcggtgacgtcacggtcgacgaggtgaacgaggtctgcgacaaggtcctgaagaagcagacgccggtcgacattatccgcgattacccggttgagaaagcggatgtgtacaagccttacgccgagaaggcgatgcaggtctcaaagccgctcttcggcatcggaatcaaggatatcgacattccgtccgacggttacgagcgcatgaagaagtacgccgaggcggagattctgaacgacgtcctgttcggaaagtccggggagttctacaacaagctgtacgaggagggactgctctcaagccagttcgatgtcagctgggagatcaaccacagctactcgttcaatgccttgttcggcgagagccgcgacccgaaggcggtgtacgaccgcttcatcagctgcgtcgagggcgcgaagagaaacggcatatccgcggaggatttcgaccgctcgaagcgcgcgctctacgcgtcgatggtcaagtgcttcgactcgaccgaggatatcgcgaactacttcctgaactacaagatagacgacggcgatcttctcgactatgtggacgttataaagaacgtgacgattggcgatgtgacaaagctgctgaacgacgcgttcagacctgaatactattccatgtctgttgtaaaccctttggaggttaataaatga

SEQ ID NO: 2624 - DNA, 1848 bp, Unknown
  Unknown gut bacteria
atgtgcggtcttgtaggatacacaggaaaacaggcgagacaccgcgagatacttcagaagatgatggagcggataatacaccgcggacctgattcatcgggagagttcatcggcgacgaggtcgcgttcgggttcaggcggcttagtatcattgaccttgagggcgggtctcagccgatatataatgaggacgggagtgttgttactgtcttcaatggtgagatatataattttcagactcttcgggcggagcttgaggagaaggggcacgtgttcacgacgaatacggatactgaggtgcttgtccatggatgggaggagtacggcgaggggctcgcggagaggcttcgcgggatgttcgcgtttctgatttatgataagaacaggaatgtgatttatggcgcgcgggattatttcgggataaagccgctttattattaccggactgacgaaggaaattaccttttcgggtcggagattaagtcgtttcttgagcatccggagttccgcaagaggcttaataagagggcgctgagaccgtatcttacgttccagtattcgtcgcttgacgagacgttttttgagggagtttataagctcccgccggcgcattatttcacgcttgcgctcggggacggcgcgaatgagatgaagactgtgcggttctgggacgaggatttttccgaggttccggggaacttcgataagtatgtcgaggagattgaccggacggtgcatgagtcggtcgaggcacacaggataagcgacgtcaaggtcggggcgttcctgtccggcggcgtcgattcgtcgtatatcacggcgtgcctgatgccggataagacgttttcggtcgggttcgattataataagttcaacgagacggattacgccaaggagctgtccgaccggctcgggatcgagaattaccggaagctcatcacggcggatgagtgctttgacgctttcccggatattcagtaccatatggacgagccgcagtcgaatccgtcgagcgttccgctgtatttcctcgcgaagctcgcgcgcgagcacgtgaccgtcgttctgtcgggtgagggcgcggacgagatttacgccgggtatgagtggtacgacgagacgccgctgatgcggaagtacaagaagattccgcagttcctgcgcgtcgcggcggcggatgccgcgaagaggctgccttatttcaaggggcatgatttcattataaaatcgagcggaagaccggaggattatttcatcggtcaggcgcttgtctggcacgataaggaggcgcttcgcgtcctgaagccggattaccgcgtcggtccttcggcgctcgaggtgacggctccgatatacgccagagtcaagggaaagccggagcttgacaagaagcagtacctcgacatgaatctctggctccccggggatatccttctcaaggcggacaagatgtccatggcgagctcgcttgagctgcgcgtcccgttcctcgaccgggtggtcatggagcaggcggagaagataccgcacgagtacaagatcaacggaaagaacacgaaatacatcttccgcaaggcggcgaacaagaccctccccgacgagtgggcggaccgcaagaagatgggcttcccggtcccgataagatactggctccgcgaaaagaagtactacgacatcgtgaagggttacttcacgagcgattacgccgcggagttcttcgacacggaagagctcatgaaggtgctcgacgagcattacgcgggaaaggcgaacaacggacgccgcgtctggacggttttcactttccttgtctggtacaagcgcttcttcatcgacgagaccgtctga

SEQ ID NO: 2625 - DNA, 1737 bp, Unknown
  Unknown gut bacteria
cccgtcgcgggtcttgaaggcgacgtcataaccgtgaacgtcggcaccgacgactacaaaataacaaaaaccctcgcggctctcgccgacaagtggtcaaaaaccctcctcgagagaaacgccgaatacgcagaaaccgttgacgacttgaaatacgatctcgaaatctcaatcctcagcccgttcatatacgaactcgattcggaagacatcaccaccttcgacctcaccctcgacgaagccctcacaatcgccgaaaaaacagttgactacgacgaaaccagactgaccctcgtatacgccatccgcgacaactggtacgccgttgacgacgccttcggaatgtacatgatggacaaagaaggctacggagaggaaatcaccgaaccggacatccccgaaatcaccttcgacgacgtcgcggacggcgcctggtacgcggattacgttaagatggcggcggacgccggtctcatcaagggcaagggcgaaggaaagttcgctccggacgagaacatgacgatagccgaggcgataactctcgcgtcccgcttcaacaacctcctgcatgagatcgagactgaccccgcggacggaaagaccggggaaaagtggtacgatccctacatcgagtacgcgaaggagaatagcctcccgtacgattacgccgattataacgcgaagatcacccgcgaggagttcgcgcacattttcgcggctctctacaagaataataagtcactctacgacgagggcggggtcaccgcgataaacgacgttccggagaacttcatccccgacgttccgatgacgcataagtactcggacgatatttacacgctctacaggctcggagtcctcggcggaagcgacgagaagagaagcttcctgccggattcgaacataaagcgctccgaggtcgccgctattctttgcagaatgggcggagagggcagagtcgagttcttaaaaacggaggtcataacgatgaagagaagattcctcgcgatgatcatggcggtcgtcatgtgtctttcgcttgcgtccggggcgtcggcgtacagcagcagcaaaatagaggacgtcacgccgatcatctggaactgcgaattgagctattatgacggcaggacggttatcgaagtaagattgtacgactccgattacggtcagctcgacaaggagacgctcatcaagtatcagccgtactatgtcgtgacggacgattccggcaatacggtaatcaagagacatttcaactccgacaggttctctcttgagctgaccgaaccgggagactactttttcacggtttacgactccaccggcaagaggatggggatgaggtgggattatccggatggaagcgtctatttctatgacgaccctctcgatttcttcgtgagagagggaaagtccgacagtcagaaggacgacgcgtacagagataagtccgcggttctcgacgtcagctgtctgcgctccgacgtgtacgggaccgacaatacgaaggttgatctctggctctggttcacgcgcacggacgacccggagcttccgattgacgatgagtttctggagaagaacgcgccttatgtggaggtcagtgatttctacggtccggtttttgatccggatgctgtccggtatgaaattaccggagacagtatgcacctgactgtggatggtccgggtcttttcgaggtcaacgtgtacgataaggaacggacgaagcag

SEQ ID NO: 2626 - DNA, 1398 bp, Unknown
  Unknown gut bacteria
atgatcaccaatatgacgagcgacgcgaaccaggtgcagtcgggcataaacctgacgctcaggctcttcatgcgttcgccgttcgtcgttttcggcgccatgataatggcgttccagatcgataccaaagcggcgctcacgttcgccgtcgtcataccgctgctgtcgctcgtcgtgttcggaatcatgctctcctgcataccgctctataagagggtgcagtcgaggctcgaccgcgtgctcgggatgacccgcgggaatatcgcgggcgtcagggtcatacgcgcgttctgccgcgaggaggcggagacgaaggacttcgattccgcggcggaggagctcaactctgagcagagactcgtcgggcgcatctcggcgctcatgaatccgctgacgtatatcctcatcaacttcgccgtgctcgcgctgatttatatcggcgcgctgcgtgtcgacgcggggatactcactcagggcgcggtcgtctcgctctataactatatgcttctcatcctgaccgagctcatcaagcttgcgaacctcatcattacgatgacgaagtcggtcgcctgtgagaagcgcatcgaggaagtcctcgatatggaggtctcccagacctctccggaaaagctcgcggcggagccggagaatgatctctcggtcgagttcaggaatgttgcgctgaaatacggctctgccggcgcgaactcgctcgagggcataaccttcggcgcgaaaaagggcgacgtcgtcggtataatcggcggcaccggctccggtaagtcttcgcttgtcaacctcatcccgcgtctttacgacgcgaccgaaggagaggtgcttgtcgacggagttgacgtgaagaaatacccgctcgatgagctgcgtgaaaagataggtctcgtcccgcagaaggcgcttctgttcaagggcacgatacgttcaaaccttctctggggcaacaaggacgcggacgacgaaacgctcgaggaagcgctcgtcacatctcagtcgaaggaattcgtcgacaagaaggaaaagaagctcgacgagcccgtccttcagggaggaaagaatttctccggaggtcagaagcagaggctgacgatagcccgcgcgctcgtcagacggccggagatactgatcctcgacgacagcgcgtccgcgcttgatttcgcgaccgacgccgctctcaggaaggctctcaggaatcttccgtacaagcctacggtcttcatcgtctcgcagcgcacgtcgtcgatacgcaccgcggataagataatagtccttgacgacggaaaagccgtcggtatcggcacgcacgacgagctccttggaacctgcgaggtctaccgcgagatacacgaatcccagtacaagaaggaggatgcttcgaaatga

SEQ ID NO: 2627 - DNA, 2298 bp, Unknown
  Unknown gut bacteria
atgaaaacaagaaaggcagagcgggcacgcgcccgacagaacaggattatggatgagaaagatatatgtgtgagcgggaaatcggtttcctttacgctcccgccgtgtgagccgcgcggatttgagccgggcgcgcgctggctgacgatgaatactgagagatacccggagttcgcggaggttccggcgacattctttgtgaactgtgagaggcgtttcttcgcggcggagttcgcgaaaaccgtagtggttccgcacggtaagtcgcctgtcgcgcatatctgcgtcttcggagacacgaaataccgcctgagcgtgaacggcaatgttctcggtgtgggtccggcagccgctggcggcgattacgcgaacacaaagccaatgccgaagcagtactatgaccggtacgatctcgcgctcacagacgaaaacccggatgaaagcaaagggataaccctcgatatcctcgcggaggtgcagacgcccggcatcgtgcagaccgactattcccgcggcaggggcggctttatattctcctgcgccgtgacatacgaggacagggagccgttcgtcatagtatctgacgcaagctggcgcgcccggagaaacacgcgttacacagagtgtcatatctgcgacctgacgcgtccgctcccgaagtgggagaagccggagaccatcacggacaagagggcgccgtggaacctgacgttcgccgacataccgatgccggagcgcgagacgatagtcccggtccgcactgacgtgacagacaatataggcgagcgagtcacccgttccgggtttgaccgcatctattcggcgtatgtcacggtgagggtcgataaccgctctgacaagcccgccgggataaaagtagtatccgccgagtattcgccgtcgccggaattaaatcacacattttacataaccgtcccgaccggagagagcgtttatacggatctcgtgatgcgcagtgtgggtgaggtggtcgcggtttccccggaggacgtcagcgtcgatataagccttatatatcagcactacccggttgaccgtaagaacacaggcgtttttgaatgttcggacgacaagctgacaaatatctggcggctggggcgtgacacgctcgagatgtgccggcagacgctgcatcttgacagcccgctgcatcaggagacgctcgggtgcgtcggggactatatgatcgagagcgtgatgactcacgcgacgttcggggatatgcggctgacaagacttgatctcatgcgcatttcggactatatccggatgaacgagggcgtgatgttccacacggcgtacagtctgcttttcccgacaatgctgcttgattattacaggttcaccggggacacgcggacggtgatggagcttcttccgaccgtggatacgcttttcgcgcggttcaggacttatatgaagggcggggtgatatcctgtccgccggattatatgttcatcgactgggcgcggattgacggcttcaatcttcaccatccgccgatggcgctcggtcagacggcgctgaacgcgttttatcagagggcgctcacggacgccgcggagctgtacagtgtttcgggagacgggaaaaaagccgcggtctgcgagaagaaggcgaaccgacacagaaagaactgccgcgtgagattctacaacaggtatttaggggtgtacggcgacggcgggagcgcaccggagtatgtctatcctccgaccacgtggcttccggagaacccggagaaagcgtatcactcgaggcacgcgaacatactcgcggtctggtcggggctcataaccggaggcgccgctgacagtctgctgcggaggatactgaccgaggacactcttgacggatacacggatattgacattcagccgtatttcatgcactatctgctcgagattgtgcgggagcgcgggatgttccccgtgtacggactgcgcctgatacatatgtgggacaagcagctgaacgattcgccaaagggtctgaaggaaggctggaacgagtttgtgggggacaacagtcacgcgtggggaggcaccccgacgtggcagctcactatggcgttcagcggattcagaatgcttgagccggggttcgcgaggttcagtctgtccccgtcgcttctggggctcaggtatatgcgcgtggcgataccgacgccgaacggacttatagatatacggatggagagcggaaaggaaactgtgataactctgccggacggctgtgagaagcttgaggacggaacatattcgctgtcgctgtaa

SEQ ID NO: 2628 - DNA, 1164 bp, Unknown
  Unknown gut bacteria
ctcacgatagccggtcttctcgtcacaatctacggcttcgcgcttgcgacccttatcctcccggacaaggatttttcggaggacgagaaccgatacctccagcagaagccgaagttctcgatcagcgcgctcacaagcggcaaattcacctccgagatcgcgacctacttctcggaccagattccgctcaggaacgtcttcgtcggcacgaaagcggtcgttgagatagccatgcagaagcaggagaacgacgatgtcctgctcggctccgacggatacctcatcccgaagaacgaccacccggactacgaccgcgccggaaagaacatcaaggcgataaaccgcttttccgagacgctgatcacctcgtccgactcgtcgctttccgtcgatatgcgggtcgccatagccggaagacctcaggacgtcctgacgcgctacattcccgcgatatacccggcggagcactacaccgaccggatattcaccgatatctgcggagaactcgcggcgccgtcgatcgatcttctgacacccctgacctcgcgcgccgacgccggggaatatgtctactaccgcaccgaccaccactggacgaccctcggcgcgtattacgcgtactgcgaaataatgaaatcctttgacatggagccgtatccgcttgagcacttcacgcgcgaaatcgtctccgaagagttctacggcacgacatggtcgaaagccggaatgaaatggataaagccggacgagatggaatacttccgctgggacggcgacaccgatatggtgacagagatcaccgacaccgggagaatgatcgacgggatgtacgacctcgaacgtctcggagtcaaggacaaatacagctccttcataggcggcaacaacggatacgtgaagatatatccaaaagaaggaacagcgctcgccgctgaaaagcgcgaaaagctcatcctcatcaaggacagcttcggtcactccgtggcgcccttcctcgccgagcatttcgacctcgagatactcgacctccgctactacaagctccaggtgatagacttcgtcgcggagtctgacgccgacaagctcctcgtcctcgtcaacgccgacagcctcgtcacctcgaactcccttgccatgctgaacctcggtcttggcggcaactga

SEQ ID NO: 2629 - DNA, 1692 bp, Unknown
  Unknown gut bacteria
aacgcgcgcggcatctggcagactgtatggctcgaggcgagacccgaggcttggatcgactccttcttcattaaaacgagtcttgacggtgaaatcacgatctcggcggagcttgccgggaaatgtgacggatgcgtcgtcgactccgacttcggcggggtgactgcctcggctgaggtgaaggacggcagtgcggagcttgttttcagaatagacgagcccgcgctctggtcgcccgaggagccgaacctctatgaaggaattatcgctctcagggtcggcgacacggctgacgttgtctccacctatttcggcatccgcgagatcgggaccggcgtattcggtgagcacggacatcgctatatcactctcaacggcaagccgtatttcattaacggcgtgctcgaccagtcgttcaacccgaagggatttttcactctcccgtccgacgacgactgccgcgaggagatacttcgcctgaagcgcatcggaatcaacatggcgcgcatacatatcaaggctgaggagccgctgaagctctattatgccgataagctcggacttctcatcatggaggacattccgtgcttctggggtgagccgacgcccgaggcgcgcgttcagttcgagcgcgagatggagtggcagatcaagcgcgaccgtagtcacccgtcgatattctattgggtcgtcttcaacgagacatgggggctcatctccaatcttaagaacgaggacgggaccgagaagcgcgagtacaccgccgagaccgcggagtgggttgtcgactgcttccacaaggcgaaggcgctcgacccgacgagactcatcgaggacaactccgtctgcaatcaggaccacaccgtgacggacgtcaacacatggcatttctactcgaacggttatgagaacgtcaagaacgttgtccatagcttctgcgagggcgctcatgtcggctccgaaaagaactacaagagcggctacacgatggcggacgtcccctgcatgaacagcgagtgcggaaacgtctggggcgtcgacggaaacgcgggagacagcgatatctcgtggcagtatcgttacatgataaacgagttcagactccacgataagctctgcggcttcgtcttcaccgagttccatgacgtcgtcaatgagttcaacggatattacaagatagacaacagcgataaggatttcggctacgacgagtatggcacgggtcttcgcgacctgcattcccaggattacctcggcgcggatttcgctccgatgactactgtcagacccggggatctgatctcggttccgatgttcggctcgagcttcaccgacctcagacacggtaaggcgctcgatatctcgtggcagctcaggctctgcgacccggtcgacggagactcgatcgctgacgtcggcgaatattcgatcatatggaagggctacggcgagttcgacgctggcgtcatccgcacagtcatgccggatcacgacggagtggcggttctcatgtggacgctcttcgacggcagcgaggctgtcatgtcgaacgctgtgctgttcgatgtcgacggcgagcgcgaggacgtttacacggctgagccctcggcgctgaccggaagcggcttcggaagaatcattccggcaattcagggcgcgaaggtaagcggtctcggctccggcgagttcact

SEQ ID NO: 2630 - DNA, 1482 bp, Unknown
  Unknown gut bacteria
aaaaaaatgaaaagaaaactttcactttcactcgcgctcatgctcctcgcgctgaccgcggctcaggctgtcgcgtgcggagacagcaccgacaaaaagggaaacgacactacggcgtcttcctccggaaatgagaccactaccgctgaggagacaaccgcgaagtcgcttctcgacgacctcggggacaaggatttcggcggacgcaccttcaccttcctcgacgcgaacggcaacccggcggctcacgtcaacattcccgctgacgaggagaccggcgagacgatcaatgacctgctctaccagagagacagcgtcattgaggacaagtacaacgtcaagctcgactatatccagatcgcgaacgcgaacgacggatgcgcggcgctgaagaactcggttctcgctggcgacaatgactatgatttcgttatgtcgaacctgatgagcggcggactcggctcgatcgctaccgacggcgtcctcgcgaacctgcttgacaccccgtatctctcgctttcggacaagtggtggagccactatatgtacgacaacctccagctcgagggtcgtatgtactacaccaccggcgatatcaccccgactctctatcagatgccggcgtgcgtgtacatcaaccgttcgctgcttgacaagtacaatatcgacactaacttctatgagcttgtcaccaccggaaagtggactgtcgatgagctctacagcctgacccgcgacaaggacgaggacctcaaccaggacggcgtcatgtccgatcaggacgatttcttcggcttcgctccgcagatgcagactcttatgactgagtcgctgcttgtcggcgcgggcgttgacctttcgggtcttaacgctgacaagacggatatcgttctcgatttctcgagcgagcgcactcagaacgtcttcacgaagcttcagcaggttgttccgcacaacatcacctttgagggctattctgtcgataccggcaaggtcttctctgaggacagggctcttgttacgatgcacttcgtcgagaaggctataaacaccttcagatcgatgaacagcgattattatattcttccggtgccgaagtacgatgaggctcaggatggctatcgttcctttgtcaacgcgtggatcaacgctttctcggctatcccggctaacgctgaccttgagttttccggcttcatcaccgaggctctcgcgcgctactcctatgaagtaatccgtccgcgcgcttatgacatcacctacaaggctaaggctacccgtgatgacgagtccgccgagatgcttgacatcgtcttcgataacgtttacctcgatttcaacgcgatctacgatttctcgggcatgatgaacgcgttcaactctgtgcttgttgaccagactcctctagcgtctactctcgcgtccaagctgacctccgctcagactcaggctgaaaagcttgttcagaactgggttgactga

SEQ ID NO: 2631 - DNA, 1458 bp, Unknown
  Unknown gut bacteria
atgatcgcgctgatgaccctcctcgctgtctctgtctcggcagcggatgagtccgcagcgaaaaacgaaatcacgtcgataaaactcaacaagagcaaatcggacatacagatcgacgtgtcgctcacgacggattatttcaatgagaacaagtcggcgacactctatgtcttcgagctcgcgccgtaccagtccgcctccgcgctcgacgcgctcgagccggtcgccgacttcaaggcggctgaaaccgcttcggtcaagataccgtacataaacggcaacacgaaccggctctactcaaagttcctgatagccgaacgccgcggtgacggcagctacggggtgatcacgagcgcgaaatacatcgagaacctgacaatcctcgccgagaacaccggcgactatccggcgaccagcagcaagaagggtctccagatccagatgttctcagacgcgcagcagctcggcgtacagcacgcgacgatcaatatcccgctgaacgagtatatcctcggcgagaactcctccggcgcgctctccttcgtattcggcgggcagacatactacctcgacaaggacaagatcgcgctgctcgaccaccgcgtgaaggtctattccgacgccgggataaacgtctatttcaacatcgtcctcaccccgccgaccgacgggatgaacgcgacgctgaagagcttctatttcgacggcgtgtcgaccgaggcgagcctctgcgcgctcaacacgaagaacgaaaccgcgatgaagaatttcgtcgcgttcatggactatctcgcgtcgagatacacgcgcgaggaccacgcctacggtttcgcgccgaacttcatcgtcggattcgaggtcaactcgaaccgcacatggaacagcgccggtccgatcgagatgtcgaattatatctactcctactgcacggcgttccgcgcggcgtacacggcgatgaagtcgcacttcgcgaacgggcgcgtttatatctcgctcggaaacaacttcacgtcgatggcgtccgagcccggcgcggcggctgacccgctctatgactacgccgcgaaggacttcctcgatttcttcaacaccacgataaagaattccggcgatatcccatggggactcgcggtcaacccgtacccgtccgacgtcacgtcgaccgagttctggctcgacagctacgctgaggacaatctctcaacgccgttcatcacaatgaagaacatagccgtgctcacgagatacatgaaccagtctgagatgatgtacggctccgaggtcagaagcgtcatcataagcgaattcggcgtctcgggagacccgaacgatcagaactccatgtcgcttcaggcggcggcgtacgctctcgcatactacacggcggctcaggacaaggatatcgacgcgttcatctggcatcgccacgttgaccactccggcgagaacgcgtggtac

SEQ ID NO: 2632 - DNA, 1143 bp, Unknown
  Unknown gut bacteria
atgaacagtgatctgactccgaaacaggcagccgaacgcctgctcaaacgggtcgagaagcccggaagatacacgggcggcgaatacggcgaggtcatcaaggacaagtcgcgcgtcaaggcgagattcgccttctgctttccggacacatacgagatcggaatgtcgaacctcggcataaggatactctacggcgcgataaatcagtacgacgacttctggtgcgagcgcgcatacactccgtggaccgacatggaggaacagctcagaaaatacaatattccgctctacgcgcatgagtccggagacccactccgtgatttcgatttcgtcggtttcaccctccagtacgaactctgctacacgaatgtcctcaacacgctcgagctcgccgggatacctgtgctcgcgagcgataggggggacgatatgccgatcgtcatcggcggcggaccctgcacttacaacgcggagcctgtcgcggatttcttcgacgtgttctcgatcggagaaggcgaagaggcacttccggagataatgcggctctacgccgacatgaaggaatccggagagtacacgaaaaaagaattccttcaccgcgccgcgaagctcgatggtttttacgtcccgtcactgtatgatgtcagctacaacgatgacggaacgatcaaggcttatacgcctgtatatgatgatataccgacgaagatcacgaaacggataatcaaggacatggacaaggcgttctttccggataagttcgtcatgccgtatattgagactgtgcacgacaggatcgttctcgaggtctatcgcgggtgcatacgcgggtgccggttctgtcaggcgggaatggtctacagacctatacgcgaaaaatcggtcgacgtactgaacgactgcgcgaagaagctttacaaagctaccggatacgatgaaatatcgctctcatcgctctcgataagcgattacagaaatatcgaggagctctgcgacaagctgctcgagtggacaaacgacgctaaggtcaatatctcgcttccgtcgatgcgccttgacagcttcacaaaggaactgctcgagaagatctcgaccgtccggaacgccgggctcacgttcgctccggaagccggtacgcagaga

SEQ ID NO: 2633 - DNA, 1890 bp, Unknown
  Unknown gut bacteria
agtcagattgcggagaacgagcagaaactcgcagacggtgaaaaagcgatatcagacgccgagactgaaatctccggaaacgagaaaaagatagccgacggagaaaaggaatacgccgacggtctcgccgactacaacgaggcgaaggaaaccgccgaccgcgagttcgcggacgcggagcggaagataaacgacgcgaaggacgagatctcaaagctcgaaaagccggagtggtacgtgctcgacagaagcaagacgatgagctttgcaagctttgactcgaacgcagataagatcgccgccatcgctaaggtctttccgctgttcttcttcctcgtcgcggcgcttgtggctcagaccaccatgacgagactgatcgaggaggagcgcgggcagatcggtattctcaaggcgctcggctattcaaagtctgacatcatgatgaaatacgtgatctacgccggcataccggggattttcggaagcgcctgcgggctcgcggcgggattgttcgtcttcccgtcggttgtctggaacgcttataaaatcatgtatcgtttcccgacgcttgagtacagcttcattccttcgatagcgctcggggcgtccgccgtcgcggttgcctgcatacttctgtcgactgtctgggctggcgcgcacagcctcgcggaaactccggccgcgcttctgctcccaagggctccgaaggcgggaaagcgcgtacttctcgagagggtcggctttatctggaagcggctcggattcaacagcaaggtcaccatccgcaatatcttcaggtacaagaagcgcttcttcatgacgacgatcggcatcggcggctgtacggctctgctcctgaccggcttcgggctgagaaactcgataggcgacattgtaagcaagcagttcgaagacctgatgagatataacctgacgatagacctgaacagccagaccgaagaccttgaccgccttgacgctttcctgacgtccgacaggactgacggctcgacgctgattcactccgagtacggcaaggtgataggcggtaaggacacggtcgaggcgtatttcagggttccggagctcgcggatgactacgccggtttccagatgctcagggagagaaaaagcaagaagccgctgacgcttgacgatgattctgtcatactgaccgagaagatggcgtcgatactcggcgtctcggtcggggacaatgtgacgctcgagaacgaggatggtctcacggcggacttcagggtcggcgggatcgccgagaactatgtcatgagctatgtctatatgacgtccgacctctacacgagcggcttcgggacagagcctgattacaacgtcgttctcgtgaaatcgaacgcggacgccgccggcgaggacgccgagaccgaggagctgctcggcatgaagtgcgtcagctctgtttccttcacgacgtcgatgtcgtcttcgtttgagaatatgctcgggaagatcgactatatcgtcatagtgctgataatctcggcgggcgcgctcgtgttcgttgtgctctacaacctgacgaacataaacatagcggagcgctcaaaggagctcgcgacgataaaggtgctcggcttcttcgacggagaggtcgccgggtatgtctaccgcgagatcgcggcgctcagcgtgatcggtactctgttcgggcttttcgccgggatattccttcacaagtttgtcgttgtgacggcggaggtcgacagcttcatgttcgggcgttcgatctacccgtcgagcttcctgatttcggctctgataacccttgtcttctcggcgctcgtctgcctgttcatgcttaagaagctgaacggtatcgatatggtcgagtcgatgaagggcggggaataa

SEQ ID NO: 2634 - DNA, 1368 bp, Unknown
  Unknown gut bacteria
gaagaggacttcaagaagcggctcagagaaaaaggcgagttcgacataatcggcttctcgataagaaccaccgctttcccggactgccagaattacatcaagtggacaaaggaagtatatcccgacgtcttcatcatctgcggaagctatcactgcacgctcgtgccggatgaggtactcgcagttgacggcgtcgactgcgtgtgcgtgggcgacggagagtaccctgagcttgagctctgcgacaagatgaccgccggtgaggattacaccgacacaaagagtctctacttcaagaacgacgacggaaccttcaagcacaacccgatagcgccgctcttcgccgacctcgaccggataccgataccggacttcgatcttttcgacttcgataaccttgagtcgtctaaggtcgggaccgcgatcgtcgtcgtcagccgcggctgcttctacaactgcacatactgcggaaacggaaacttccgtaaggtttacccgaacaagaaaatctacgcccgcttccgctcgccggaaaacgccatactctacctgaagaccctgctcgcgaagcacccgtatatcaagttcatcaacttccgcgacgcgatcttcaatatgttcccggactggttcgacaagttcattgatatgtacaaggaagagataggtcttccgtgtaccggaaatatccgctttgatatcctcaccgaggacactgtcaggaagatgaaagaggcagggttctacacgatcgatatgggtctcgaatccggcgaccccgagatgagattcaaatatctcagacgctaccagaccgacgagatgatcatccgctgctcgaactggttccacaagtacggcatcgcgcagctcacctacaacatcatcggtctcccattcgaggacattcaccgcgcgctcaagacgataaagctcaacgcgcgcatacggagcgaccgcaccataccgaacatcttctatccgtatgagggaacgccgctttacgagatctcaaaggaagcgggattcataccggacggcgacttcacacagcggcgcgtgccgctcgtacagcctcagttccccgaggagcaggttctcttcatagaggcgtatttcatgcacttcgtgaagcgctacaggctcgcctacgcgttgccgaagggaatcggaggcatatatgagaaatggctcgatcaccgcgtcacgggcaagcacgtgccctacaagacgctcgtgtggtggcatgacagatacacgaacgtccgcaacagtctgaaagacttcctcgtcaaccgtatgccgaagctctacgtgaagctccgcatgatcaagcaccacagacgcgccgagaagaatatcaaataa

SEQ ID NO: 2635 - DNA, 1299 bp, Unknown
  Unknown gut bacteria
accgcgggctccgacatcatgaagagaaacggcttcttcggtcccggcggtgaggttaacatcaccaacgtttcgacggctgagatcaccggtccgtccaagatcatcgacgtcgctatcggtccggagggtacctggtcgatcatcgacgagaagagatccaaggtctacacctacgactccgagggcaacctcctgttcatcttcggtgaccagggtcagcagctcggcaacatccagtccatcgaggctatcgcttatcttgataacgatatcctgcttctcgataagacttccgacaatatctcggtattcagacgcaccgagtacggcgatctcctgatcgacgcgctgcgcaataccaatgagagaaattacgacacgaccatcgactactggctcgagatcctcaagagaaacaacaacttcgactccgcgtatatcggaataggcaagagcctttacagaagcgcgaagtacgaggaagcgctcacgtactacaagtccgcttatgataccgagaactactctgaggcgttcaaggaaatcagaaagaactggatttcgaagtacatagtgctcatcccgatcatcgttgtcgcgataatcgtactgctcgtactcttcaacaagtacgcggcaaagctcaacaagaagactcagctcaagaagggccgcaagaccttctgggaggagctcatgtacgcaaaccacctgatagtccacccgtttgacggcttctgggatctgaagcatgaataccgcggatcggtccgtgcgtccttcgtatggctcgcgctcgcgatactcaccttctactatcagtcggtcggcaccggttatgtcttcaacccgcgcagagcttattccactatcctgatccagttgaccgcggttctcgtgcctgtgcttctctggtcggtatccaactggtgcctgaccactctgttcgatggtgaaggaaccttcagggatatcttcgtcgcgacctgctacgcgctggttccgattccgatactcatcatcccgtcggtcatcatctcgaacttcgctctggcgaccgaggctaagacgatcaacctcctcgtttcgatcgcgtttgtatggtgcggactcctgatcttcttcggaacgatgacaacgcatgactatacattcggcaagaacgttatcacgactctcggtaccatcgtcggtatgggcgtcatcatgttcataggcatcctgttctccacgcttcttgccaagatcgtaagcttcatatccagcatcgtgattgagatcacgtaccgaatgtaa

SEQ ID NO: 2636 - DNA, 1197 bp, Unknown
  Unknown gut bacteria
atggcagagcagaaaaacataaattacgacgaaaaccagatacaggtgcttgaaggtctcgaggcggtcagaaaacgccccggaatgtatataggctccacctctatacgcggtcttcatcacctgatatatgagatcgtcgacaactctatagacgaggcgctcgcgggctggtgcgacaagataatcgtcacgctttacccggacaacagcgtctcggtccaggacgacggacgcggcgtcccgagccagatacaccacaaggtcaagctcccgacaatggaggttgtcttcaccgtccttcacgcaggaggaaagttcggcggcgagggatataagatcgcgggcggtcttcacggcgtcggcgcgtctgtcgtcaacgctctctccgagtggatggagatagacaactgctatgagggcgagaggtataccgagcgcttcgagcgcggcaaggtcgcgagaccgttcgctcatgtcggctcttccgagggaaagcacggtctttatgtgcgcttcaagccggatcctacgatcttcgaggagaccgtgttcgattaccagacggttctcaaccgtctgagagagcaggcgttcctcaacgccggcgtgaagataatcctccgcgacgagaggggatcctctcaggcggcgaaggcagctgcggcggctcaggaggcggcggaggaaaagctccgcaccgaggacgaggcggacgctccggacgaaaacgctgccgcggagaacgctcttgacagcgaggacatggcggcaaaggctcaggacagcgcggctgacgcggacgagaagccgtctccgctgatcggcaagccggaggtcgagctttgctacgagggcggaataaagagcttcgtcgagcacctgaacaaggtgcgcagactcgcgatgatccacccggacgtaatctatatgcgcggggagaagaacgactctatagctgaggtcgcaatgcagtacaatgacagctataacgagaacatcatgtccttcgcgaacaatatgcacacgatcgagggcggaacccacgagaccggcttcagaacggcgctcacagctgtgctgaatgattacgcgagaaagcacggcatcctcaaggcggacgacaagaatctcaccggtgaggacacacgcgagggactctgcgcggtcataagcgtcaagctcaccgacgcgcag

SEQ ID NO: 2637 - DNA, 1104 bp, Unknown
  Unknown gut bacteria
agggcgcacgcggagaagatgcggtcgcttttcggcgaggattattaccttgaggtgcaggatcacgggattgaggagcagaagagggtgaatcgggggattgtgcggttgtcgcatgagttgtcgattcctatggtcgcgactaatgacgcgcattatctgagacggcaggacgcggacagtcaggcggtgcttctctgcatacagacaaataatgtgataacggacggtcggccgatcgggtttgagacggatgagttttattataagactaccgacgagatgcacaggctgttcgggtatcttgatgatgatccgctcgggagtccgcttgataatactgttaagatcgcggagaagtgcgattttgactttgatttttctaagttgtatcttccggcgttcaagccggaggacgggacgcctccggatgagtaccttgagaggctcgcatgggcgggctttgaccggagatttaaggacggacggtttgattttgagcttcatccggagactgagtaccgcgagagggtgaagtatgagctttcggtcatcgggaagatggggtattcggagtatttcctgatcgtgcaggatttcgtcaactgggcgaagtccaaggatatcccggtcggacctggaagaggttccggagcgggaagtcttgtcgcgtttcttatcgggataacggatattgatcctctgcggtttgatctgctgtttgagcggtttcttaatcctgagcgggtcagtatgccggacttcgatattgatttctgctatgaccgacgggatgaggtcatcgggtacgtcaaggagaggtacggcgacgaccatgtgtcgcagatcataactttcggtactatggcggcgagggcggtcgtgagggatgtcgggcgggcgctcggtatgtcctattcggagacagacgcggtcgcgaagtgcattccgcgtgagcttgacgtgacgcttgacagcgcgctcgactattctaaggagttgcgggagatgtacgcgtcggacgagaaggtgaagcggctgatcgacacgtcgagagcgctcgagggtatgccgcggcattcgtcgacgcacgcggcgggcgtc

SEQ ID NO: 2638 - DNA, 1386 bp, Unknown
  Unknown gut bacteria
gtgactgatggaaaggacaccacgactgacagcacttccgctgagaccacggctccggaaccggagtacgagtacgcggacatcgaccttggaggcgagacattcactattctcaatacgagccagacctacaacttctactcctatcttgatttcgatgaggcaacaggagagacgctgaacgacgcgatcttcaaccgcaaccgcaaggcggaggatctctacaatttcaaccttgagatagtggaatatgagctgaaggaagcgaacacgaaattcggacaggcggttctcgcgggtgacgcttcctatgacgccgcgttcctgcgcgactattatctgaacacagagctgaccgagggatatctcatgaaccttgacaccgttccggagttccggctcgacaaggagtggtgggacggcgaggttactgaggagtcgaggataggaaagagccgtaaggcgctcttcgcgatgacagacgtctcgctctgcgacttcgagggaaccatggtaacgttcataaacgagaatatcatgaccgacctcgggcttgagaacccgtatgagctcgtccggagcggaaagtggacgtttgacaagttctgtgagttcatgcacgcgggcgcgagcctgggcggcgatgagtcattcacactcaagcaggacggaaacgcgcgctacggcgcggcgtcctatgagcgcggcagtgcggcactgatctccggcgccggtatagattcggcgtacatagacgacagcggacggccgcagatcgggtataccggcgagaagttctacacatatttcgagaagataaaggcggcgttctcggtcgccggcgattatattcacgcgaacaccggcactgtcaacgattacggacattatgagaatcttttcaagtccgggcgcgcgctgatgaccctcgcgcagctcaaggcggcgaacaattaccgcgacatggcggacgcttacggcattctgccgatacccaagtatgatgagatacagaaggattaccactgcctgcgtacattcacatacctcatggttgtaccggtcactaacaacagaccgcacgagaccggatcgatcatggatacactttcgtatatcacatataaggacatcatgccgagcttctacgcggagcgcgtctcgcagaagctgctgcgcggcgacgactcgatagaaatgctcgggatagtgcgctcttcgcgtcggtttgacgttggctcggtatataatatcttccttccgctggctgacgaggtcgtgtacaagagtctgtcgagcaacaaggaaatagcgtcgacgatggcgacaaaggtgaagaccgttgaggcaaatatcgacaaaataatggcggctatggataattga

SEQ ID NO: 2639 - DNA, 1344 bp, Unknown
  Unknown gut bacteria
atggcattgaagcacagaatcatcacggcggcgcttgtcctcatggcggcgctcgcgtcgtgcggcaggacaccgaccgaggatgaaattgacctgataaacaggtaccgcgggagcgtgggcgaaaactctgacgatgaatacgacgatatcggcgcgtcatggctctcaccggaagagaagtatgagcgtccggattctgacgattcgaggattgtcaacgttttcggcggttatgtcctgagcggcgaccggatatattatccagcgaagttctactatccggacagcgacgcgtacgagccgggctatgcgtatatcagcgggtcgaccggcgagtgttcggcgttgtgtccggacccgctctgcacgcacctcgacggaagcggatgcgagtatatgaacattgagcagattatcagcgatcccggctcggacagaatactgtacggaataaaaacgatcgccgacggagcatcaatcatgacctcgctctgccgtatcgatgtgaagaacgacgttgtgagagagcttctgcgtgacgacgcctcaataatgcggctgagattcatgtcgggggataaaatctattacagcaccgtgaagacagagcgcgtgaagagctcagacgggcagatcatcaagagagtcaccgagagattgtgctcctttgacctgaacaccggaaaggcgggcgttctcgacaacgtgtacggagattacagccgcggagaatttgttttcgctgacggcgggagattctggttccttgactccgcgaatggcagactgtttaagactgaccttgattttgaaaacgaaaagacaatgttcgaatacgaaagtgagtatcagatctctgatttcttctatgacacagatgaatccgctgcgtatatactagtccgcgccggatatatgaccggacacgccggggaagaactgattgacggatacatatgccgtatcgatagtgagggaaactgcgaaagacttggtatgccgtccgaccggatactcagcttctatctgaccgggaaatacatatattatacggcttacgacccgaaggagtacggggagtctccgcgcggcgggaaatgcacctcgtatgacaacgcgaaaatataccggactgaccgggaagaaatgtctgaagaatcgctcgttttcgacgggcaagacgagctgtttttcgcggattatcttccggtgggcgataatctgtatctcgattactgccgtttcatggacgaaggcgggaataactggttccgtgtgaccggtgtgacggcgcgcgtgaacataatgaataacacgataaagtggatgaagcttgactga

SEQ ID NO: 2640 - DNA, 849 bp, Unknown
  Unknown gut bacteria
atggatatggaaaagctgaaaaaaaccataaaggaatattgcccggcggcgtcgttcgtgttcttcgcattcgcgcttgtttcgcttgtcatctggatcgtctctgagttttctgagccgttctcaaactttttcaacaggtatgtgagttcatttttccgcggcatgatggcgatgctcacgaattttataccgttttcggtcgcggagtgcataatcatttctttgccggttttgttcgttattgtgatcgttctgtgcgtgcgggcgacgaaaaaggggaaccgcgcggcgaccaggtatatagtctcgctcgcgtcgatagcggcgctcatgtacggtatgttcgtcatgacgaccgcggtcgcgtacaacagctccacgctcgacaagaagctcggactcgaacagaagaaggtcagtgtggacgagttaaaagagaccgctgaatatatgatagaaaagatgaacgaggaccttgacgacgttaagttccgctacgccggaagctcggtgatgccgtactcggtgtccgagatgaacgacaagctgctcgaggcgtacgataagctctcggaaaaatatgatttcatcccgcgtctctggtcgaggatcaagcaggtcagcctgtccgaggcgatgacttacacgcatatgtccggtatgtatacatattacaccggcgaggcgaatctcaacgtgaatttcccggactacaacctgccgtatacggcggcgcacgagctcgcgcaccagcgcggggtgcttccggagaacgaggcgaatttcgtggcgttcctcgtctgcgccgagtcggacgatccttatatacgctacagcgggtatatg

SEQ ID NO: 2641 - DNA, 1164 bp, Unknown
  Unknown gut bacteria
atggctgagggcgaacttatccagaggaagctgccgttttcgcttgaggctgagcagtcggtgctcgggtcgatacttattgatccggaatgcttcaatgtcattgcgggaatactgaagagcgaggatttttatattgatagtcatgtgcagatatatctcgctatgcaggatctttatcttcagaacaggtcgattgatgtcgttacgcttatcgatacgctcgttcacaggggcgtgtatgacgagaagacgagtcagtcttatataaagctgattgcggacgttgtgccgtcggcggcgaatgtcgcggattacgcgcagattgtcaaggataagagtattcttcggagcctgataacggcgtcggaggagatatccgagtcggcgtattcggctgaggacgacgtgtcacatattctcgggaacgctgagcagagaatctttgccatagctgagggaaatgagcagaaggggttcacgcatatccgtgaggtgcttgtgtcgacttatgagcatctgcatcttctccagactaaccgcgcggagactatgggaacgcctaccggcttcggcgaccttgataaggtgcttgtcggaatgggtaagagcgatcttattcttatcggcgcgagacctggtatgggtaagacgagcttcgcgcttaatatcgcgacgagcgtcgcgagagagacgaagaaggcggtgtgtgttttctcgctcgagatgtcggcggagcagctggtttcgagaatgctttcgagtgaggctatggtcgacagccataatatccgctcgggagagctcacggatgacgactggacaaagctcgcgcacgcgtcctcgcagctttcggagtgcgatatattcatagatgatacgaccggaatcggcgcgaccgccatgaaggcaaagctcagacgggtcaagaatctcgggcttgtggtcatagattacctccagctcatgcagagcgacaggcggatagacaacagagtacaggaggtcgcggatatatcgcgaaatctgaagattctcgcgaaggagcttcaggtgccgcttatatgctgcgcgcagctctcaagaagcccggagtcgagaacggataagacgcctatgctgtcagacctgagagactcgggagcgatcgagcaggacgcggac

SEQ ID NO: 2642 - DNA, 1503 bp, Unknown
  Unknown gut bacteria
atgccacgaaagcaccgaatcctctcacttgtcctgctcgcgcttatcctttcccagaccgcctgcggagcggaacagcagggaaccgcggacacagacgcgcagacctcagccgatgataccggaacgaccgacgagactacaacggtcgggttcgaatacccggacgtcaattacgacggagccgaattccgcatactcaatttcgatcagctctggaatatgtacatacacctcgattcgccggagatagacggagaggttctgaacgacgccgtttacgcccgcaaccgcaaggtagaacagaagctcggctgcaagatagtcgagaagactttcgaaaacgacaccgcgaacaccttatccagaataaccgaccatgcgaagacgtcgataatgtccggtgaggacgagtatgacgtcatgatgctgccggtcagtgaggctcccgaccttatcaccggcgggtatctccaggatctcaaatcaatgcccgagttcaaatttgacggcgagtggtgggatcaggagataatcggcgcgactacgttcgataacaggctgtatttcgcgtccggcgcggctaacctcatggcgtttgacagtatgtggtgcctgttcttcaacgagaatatggcggagaatcaccagcttgatatgccatatgacctcgtccgcgagggcaaatggacgatcgacgaggcgacgaagtacgcgaaggcggtcgccaacctgaacggcgacgagtcctggaagtggtcgaaggacgggaagtgtgtctacggcatatcgtcgcatcagaactcgccggagcatttctggttctctgcgggagagttcactcttgatgttgacaagaaaggcgaaccgaaattcattcttggcagtgatcgcttctacggcgtcatggataagctcgcggtactgctcgacggcaaggagggcaccacgctgaaggcgaacaacaccgacttcgacgcggacaacggcggatatgtctatgtcttcacgaccggacgctccttcttcatgaccggcgagataaaggcggcgcagctcatgcgcgacatgaccgacaccttcggcatagttccgttcccgaaatacgacgagagccagccgcagtactacacgagccttgtctcacagctcttctatatgacgatcccgtcgacgaacacgaacacctcgagaaccgcgacgatatacgaggcgctgacgcacgagagctatctgagtgtcataccgacctactacagcaatgtcgtcgagcagaaagggctcagaaacgaggattctatagatatgctcgagataatgagacagacccgtgccgtagacgtcgcgacgatattcaactggagttcgaatctgcgctccacgctcaacacgaagctgttcaacggaaactcacaggttgcgtccgacatagccgcacagcagaccaaggtcgaggcgtcgatgcagaaattctttgacttcctcgcggaacagaacggctga

SEQ ID NO: 2643 - DNA, 1104 bp, Unknown
  Unknown gut bacteria
atggatatttcaaaaagaaactcagcactcgatatcacccggatagtcgcgcttttcagcgtcgtttcggtccacttttttctcaataccgggttctataaatatacggtcaccggaaagcggatgctcgtcatgacaataatgcgcaccgcctgcatgatctgcgtaccgctctttctgacactgaccggatatctgatgagccgcaagactctgtccaaaaaatattacggcgggatcgtgaagactctcggaatatacctgctggcgtccgccgcctgcatcgtgttccgcgttttctgggcaagggcggcgttcccgggtgacctcttctgggggatactgaacttcaagaccgcggcttacggatggtatatcgagatgtacatcggactgttcctgctgattccgttcctgaacctcatgtggaacgggctgacgtcaaagaagcagaagctcgcgcttgtcgcgaccctcattgtcctgacctcgctgccgagtatgctcaacgcctacaacttcagcgtcgccggatggtggaagacgccggtcatctccgccgaataccgcgatatattcccgaaatggtggacaggcatctatccgctgacatattattttgtcggagcattccttcgtgagttcccgctgaagctgaaggggtggcagaagctcgcgctctggggcgggtcgatactcgtcttcggactgttcaacttctaccgcagccacggcggaatattcgtctgggcgcagtacaacgactggaagggactgcctaacctcatcatgaccgtcttcgcgttcagcttcctctcgtcgataaacaccgggaaatacccgaacgccgtcaagcgcgtactcatgtatgtctccgacctctgcctcggcgcgtacctcgtatcctacatattcgacaggatgtattactcggtgctgaactcacacgtgaaggagactatatacaagctcgaatggttccctgtcatcgtgccctgcatattcctgagcgcgctcgcgctgtcggcggtgctgaatctgatctattccggaatcgccgccggatgccgcggtatccggagacgtatcggcacatccgaaaaa

SEQ ID NO: 2644 - DNA, 1347 bp, Unknown
  Unknown gut bacteria
atggcaatcgctgtaataatgccgcggcaggggcagagcgtcgagagctgcgtcataaccgagtggcacaagaagaagggcgaccgcgtcagggtcggcgacattctcttctcatatgagaccgacaaatcgagctttgacgagaagagcccggtcgacggcgtcctgctcggaattttcgccgaggagggtgacgacgttccctgcctcgagaatgtatgcgtgataggcgaggaaggtgaggacatttcacctttttgccctgaatgtgaggaaaccccggacgagacggagacagatgaaacggagaccgaaaagacggatatcgcggttgttgccacggctcaggaaaccggcgatatcctgcgtatctcaccaagggcgcggaatctcgcgctgaagaccggcgcggacctctcgaaggcggcgccgaccggacccatggggcggataatcgagcgggacgtgaatcgcattcttgacgacggaaatgttgttccgacagagagggttgagaaatatctctccggggagagggatattccggaagagacggagactgtgatagcggagaatatcgccacgaccgcgccggaagttccggcagagagcgccgtgcctgagacaacggtacaggagatgaagtctccgggaacggaggctctgtacaccgatgtgaagctcacgaacatacgccgggtcatcgcgaagtcgatgcacgcgtctctctccacgatggcgcagcttactctgaacacctcgtttgacgcgtcggcgatactcgcttaccgcgcgagggtcaaggcgcgcggagaggagctggggctcgcgaatataaccctcaacgatatggttctcttcgcctgcgcgaagacgctgctgtcgcataaggactgcaacgcgtatttcatggaggatttcatccgtgtgtttgacaccgtgaatctcggcatcgcggttgacacggagcgcggacttatggttccgacgctcgccggggctgagaagctgtcgctctgcgagctgtcgagacaggcaaaggctctgataaaagaggcgcagagcggttcgatatcccccgataagctgaccggcgggacgataaccgtcacgaatctcggctcgctcgggattgaaagcttcactccggtcataaatccgccgcaggtctgcatactcggagtaaactgcgtgacatacagaccgcgtgaggacgggacgacatacccggcgatggggctgtcgctgacctttgaccacagggcgctcgacggggctccggcggcgagattccttaaagatctcgcggcggcgctcgcggacttcgatctgcttctctcaaagtga

SEQ ID NO: 2645 - DNA, 1131 bp, Unknown
  Unknown gut bacteria
agcaaactcacaaccgggctgtacacgaagggacgcgtcgagccggacgacgttccgcagtacctgcgcgaccgctgttacaatatcgggaaaatcctttccgagatgaacacggaatgcggggagcttgtcgaaaggctgatcagaagcgacaagacggaggcttttgcgctcgattatgaatcgttgtcgaagctgcttgccgaatcgatttcggagaatgacaaggaatacgagatagacgcggagatgaccgcgaagctgagacgcgccctcagatatatggatatgtcgggggcgggcgcgctctgctggggatcaagaagaaagcaggtggtaatgaccgggatagagctcgccggaatgcgctacggcgcggatgatctgagacgcgccgccgaaaatacgctgcatacatatctgacgaaaccgaaattcagcataaatgagaacacggtcgaggtgtcgatgtcctcccgcaggcgctacagcgccgaatacgcacgcgcgtcaaacgtgaaggagagcgagagcgcgaacggagacacggcgacctgcttcgagacgaaggaggattacttctacgccctgatatccgacgggatggggagcggaagggaggcggcggtgacgtcgaagctgtgcggggtgttctgcgaacagctcctcaccggcggaaacggaaaggcgataaccctcgagatgctgaacggcttcatgcggagccgtcgtgaggagtgctcggcgacggtcgacctcgccgagatagacctgatgacaggtcatgccgcgttcgtgaagagcggcgccgcgccgtcatatgtgctgaggaaaggaagtctctataagcttcagtcaaaaaccgtgcccatcggaataatgcccgcgctcgacgcggagcagataaagtttgagctcgaggcgggggacgtgataatcctgctcagtgacggagtggcgcagagccttgaggacggcgtttggctcgcgaatcttataacctacgaatgggaggataatcttgatataatggcggagaagatagtcgacaacgccgcgctgaacaacaagaggtgcgacgacatgaccgccctgctcgtgagagtcagcaactatgaggaggagatctaa

SEQ ID NO: 2646 - DNA, 1143 bp, Unknown
  Unknown gut bacteria
atgaacaaaaaactgctgtatctgctcgtccccggctcggatgacccgacaaagcctgaggtgcggacgaaatgcgcgtcctgcgccggtatcgtggggatactgtcgaattttctcctcgcggtcatgaagatggtcatgggcatcataacgaacagcatatccataaccgcggacgcggtgaacaacctgaccgacgccgcctcttcggtgataacgctgataggcttccgcctgtcttcgaagcccgccgacaaggagcatccttacggtcacaggcgtatagaatacctgaccgggctcatcgtctcgatggtgataaccgtcctcggcgtcgagttcttcataagctcggcgaagagcatattttcgccggagccgaccgggttctctacgctcgctgtagtgatacttgttgtgtccatcgcggtgaagctctggcagtgcgggttctatatcacggtcggaaagcatattgagtcgaccgccctcatcgcggcggcgtccgacagccggaacgatgtcgtcacgaccttcgcggtgctcgtcggagcgctgatctcaaagttcaccggcgtcgacctcgacgggtggttcggctgcgccgtcgccgggttcatcatctggtccggcataaatctcgtcatcgagacttctgacccgctcctcggcgaggctccgtcgcctgagctcgtgaagaaggtcggggacaggatcatgagctacgacggcattctcggttatcatgatctcgtgatccacgactacggtcccgacagatgcttcgcgtccgtccacgccgaggtccccgcggaacagaacataatcgtcagccacgacctgatcgaccggatagagaacgattttctcaaggagaccggcattcacgtcgtgatacatctcgaccccgtcgtgacaaatgacccggagcagaaccgcattcacgaacagctcattcaggtggtctcggaggtatcctccgaggtcggcggctccgtgaccatgcacgatttccgcatggtccgcggcacgactcacacgaatctgatcttcgatatagcggtcccggtcgactgcggcgtaagcgacaaggcgctcgtcgacctcatcgacatgaagatacacgagaagatacccggaaac

SEQ ID NO: 2647 - DNA, 1359 bp, Unknown
  Unknown gut bacteria
accccagccgccgcggccccggccaccggaacgaccgcgcctgagtatgttttcgccgatatcgactgcggcggggacaacttcaccgtcctcaacgccacgacgacatggggcttctacgcctacatggatttcgagacgcagaccggcgaatcactcgacgacgccgtgtatgagcgcaaccgcttcgtcgaggaaaaatacaacataaagcttgaaatcgtcgaggacgacatcgataagaactatgagaaataccgctcatccatcctcgccggagacgacacatatgacaccgcttatattcgctgcgaccgcatcgcgtccttcattgccgacgggtacctaacgaacctgcttgacaacaccggaatacagctcgataagccgtggtgggatcagaccgttaccgaaaaatccctgatcggcgacaaaaagaagctgtacttcgcgtcgaacgacttctcgcttgtcggctttgacggaactctctgctgctatttcaacgaggatatgctcgacgacctcgggcttgacaagccttacgatcttgtcagacagggaaaatggacaatcgaccggcttaaggaatacacctccgccgccgcgaacctgaacggagacacgagcttcaaatgggacgagaacggaaacgcgatatacgggctcgcgtcctatgaggactgcgtcaacgggttcataaccggaagcggcgagaactacataaccgtcgacgcgagcggtcagccgaagctcctcgcgaacgccgaacacttttacaatgtcatcgacaaagcgttctcgataattggcactgagggcgagtttctcttcatgaacggctccggaaacagtcactacgagatgatattcaagaacggccgctcactcttcactatagccgagataaaggcaagctccaagtaccgtgatatgaacgcgaccttcggtatagttccgataccgaaatacgacgaggcacaggacagatattacagccaccgcacgcacgtctgcctgacgatgagcataccggtgacaaacgctcagcccgaccgcaccggcgcgattctcgacaccttcgcgtacctcagcaaccgcgatatcctcccgatctactacaacgtgaaggtcgcgcagaagggacttcgtaacgatgactcgattgagatgctcggaatcatcagcgagagccgcggcttcgacatcggtgagggctacggctggaccgaagatctgtccgcgaaggtcaacaccatgctcgtcagcacgaagaagaacaacgtcgcgtcgctcgttgactcgaacaggagcaagatcgaggaatcgataaacaagacgcttgaactgatgaaataa

SEQ ID NO: 2648 - DNA, 1773 bp, Unknown
  Unknown gut bacteria
atgaacgaaaacaggatatttgaaatgagccgcgccggtgtcctcccggacacgacggctgactgcaccgacaggataggcgctgtgctcgcggaaaacgaggagaatgtcacatatctctttgagaagggagtatatcgcttccacgcctcgaacggtcttatccgggagtattcgctctcgaacacggacggcgcgcagtatgagcgcaccctttccctgcttataaaggaccggaagaacataacaatcgacgggggcggagcgacattcgtgttctacgggcatctacagccgttcaccatagacggatgcgaaaatataacgttgaaaaacctcgtgatagactgggaaaagccgctcgtgtcggaaggagaaatcgtcggcagaagcgcggatttcatagacgtcaggataaatcagaacctgttcccgtgccgtgtccgggactacagcatgtacttcgacataggcgacggagaagaatccgagctgacctacggcgaccacacgatctataacccggatactcttaaagtaaccccgcggagcagcgacattgtgaaagtcaagagcgtcgaggctctgtctgacgacaccttccggctgtacaccgatgatatactgccgcctggctctccgccgcgcgtcggggatcttatcgtcctcagacacaacaagcatatacattccggtattttcgcggagaacagcaccggaatcatctgtgagaacctgactctgtattcctgcggggagggactgctgttccagttctgccgcgacgtcacctgccgtaacataacgatcgcgccgaaccgcggtatcgggcggaagatcgcctgctcgcgcgactacggcatacaggtctccggctgcggcggggcgctcacgattgagggctgccgtttccacggacttcaggatgatccggtcaatattcacagcgtcggcgtccggcttgacaggataaatgaagacggaacgctcaccggcagcttcgcaagacccggaatcagcaatttccggcattgggcaaaaacaggacacgcactcaggttcatagatcgccggagcatgaaatacatcggcgaggcaaaggtcggtgagttcactctccttgaccgagacacgttcaggataaccccggacggcgacatcccggaagcgctcgcggcgatgccggacgggagcgtcgcgatagagaacttcagcgatttcccgtcggtcacgatcagaaactgctgtttcggcagcggccgcgcgcgcgggatcgtcgtgatgaccccgatgccggtcaggattgaggacaacgtcttcgagtctcccggagccgcgatagccatagcgggcgacacgaatttctggttcgcgcccggagcctgccggaatgtgactatccggcacaacacctttaccgacagctgctttgtgacgccgtatgagtacagcgaagcggtgataacgatattcccggatatcccgcgcccgtcgaagagccttccgtatcacagcggaatatcgataacagacaacgcttttctgacctccggtgtaccggtattgttcgcgttctctgtctccggtctggacttcaccggcaacaggctgttcggaaccgagcgcggcgatatctgtggaaacggcgcggctcttcttcggctcatcaattgtgtcggagcggatatttccggaaatgtcctgaacggtgtctccgcgtccgggtttgtgcgtaccgagagcggtacgcacacgcgaagatggagacagtga

SEQ ID NO: 2649 - DNA, 1398 bp, Unknown
  Unknown gut bacteria
atgccggacaaggcgggcgcgttcctgagggcgagccgggtcatagcggagcacggcgggaatatcgtcagggtgaactacaacaaggcggtcgaccttcacacgctctttatcgaggtctcggcggacgaggagcagcacaagcggatactctccgagctcgagagcatcggatatataaccggaacagaggagggcagacaggtcatccttattgtcctgaagctcccggacgcggcgggcgcggtcagaccggttctcgaggtcatcgccgggtatgacgtcaatatatcgtatatgtcctcgcaggagaacgggacgccgtatcagtatttcaaaatggggcttctcgtcgagaacacggacgagatcaggcgtcttcttgacgacgtctcgaaaatatgcgaggtcaggatagtcgagtacgacgtgacggagaagcagctcgacggcactgtgttctacatcaccttcgcgaacgagatgagggatatattgtctctcgatcaggagactacgaattctgtgctgataaactcaaaccgcgtcatgcagatactcgacgagcgcggggagacgccgctcaagaccttcgattatatccgccgcttcgcgaagtttgtcgcggagcaccacggcgacgagtttcacgcggagataaggcgggacgagctttcggacgggtatgtgctttatacggttcagccgccgtgcgggagcgatacttatatacttgacaatggcggggaggagctgctgtttgtcgattgtgggttcgcgtgctacagggaagagatgacggggatattcgaggggctgttcccggactttcattcgaggcggaagacgcttgtcatcacgcacgcggatatcgaccatacggggctctgcgatatgttcgacagggtgtatatgtcggcgagctgctgcgagaacttccggctcgagagggcgggagagccgaatttcagggagcagaatgtgcttcacgcgccgtattgcgtgctgagtaagataatatccgggtatcgtccgccggagctttcgcgggcggttgtcgtcggggagaagacggatgacgggatgctttcgtatataggcgggtttgacgcctgcgggctgcggttcgaggtttacgagggagccggtggtcatgtgcgcggggaggtgctgattgtttccgagagactgcggctcgcgtttacgggcgatatacttgttaatgtgaagggtttcacgaaagagcagtacgatttcaatctgctggctccgtacctgatgacgagcgtgaatgtcgactcggcgaaagccaaggcgatacgcggcattgtgaatgagcgttattcggactatattttgtgtccgggacacggaatgccgatgttccccgaaaaatag

SEQ ID NO: 2650 - DNA, 1404 bp, Unknown
  Unknown gut bacteria
tccggcgcggatacgacgtccggtgagaccaccgctgaggagaaggtcggttatgacgacgacattccggcagatctgaatttcggcggggagacaatcaatgtcttcagccgcgcgcatttccggttcaacgacgaggtcacggtcgacgaggcgaacggcgacgtggtcaacgacgcgatatatgaccgcgagatcgccgtagaagatcgtctcggcgtgaagatcgagaacttcaaggataacccggaggcggggcatggctccatcgacaagatgcagaagatgattctcgccggcgacgacacgtacgacattttcacggcgagtatgtatcacgtggctccggccgcagcaaacggcatattcacgaacctgttcgacgttgaatatatcgacactacgaagccttactacacgcaggactatatagcgaagtcccagatgggcggaaatctctacgcgataacaggagatatctcgctgtcgcttctcaggtattcgttcgcgatgtatttcaacaagacgctcgtcgactcatacggtcttgaggacccgtacgcgctcgtccgtgacggaaagtggacacacgacaagctgacatccatggtgactgatatctactccgacctgaacggcgacggaaagcaggacgacgaggatctgtacggtctcggtacaagcaacgtcataatcgtcgacgcgtattgcagcgcgtataaaatgaacatgatggatgtcggagacgacggcttcccgtatttcagcatcgaccttgataagttctcatcggcggtagacaagatatttgacctcaactggcagacgaacggtgttcacgcgtataaagagataagcgacaacaatgagatgaccgacctctgcaattatttctcgcaggatcatctcgtgttcatccacaactggctctacgcgagcgagacgtcgtatctgcgcgacatgaagtccgactacggtataatcccgtacccgaagtacgacgagaatcaggacggctactacacgttccagcacgaccagataggtctgttcacgattccggtcacgtcgacgaagaaggacatggcgggagccgtgctcgaggcgatgtcctccgagagctcgaagacggtcgttccgtcctactatgaggtggcgctcaagtcgaagtacagccgcgacagcgagtcgtcggagatgatcgatatcatccacaacgggcatatgctcgaccccgcgtggatatactgctcgtacataggcgacctcgcgcaggcgccgagaaaccttatgctcaaggaaaagcgcgatttcatgtcgttctatgactcgaacaagtcgaagtaccagaagaatctcgacaagctcataaaagatttcaagagcctcgaggaaacgaactga

SEQ ID NO: 2651 - DNA, 729 bp, Unknown
  Unknown gut bacteria
atgattttatcccagcgccaacttgaagaaattgcagcctcaacaacgaaggacttcaaccggttctttttcggggatgaggcggacaagcccgaccgatcagctttgccaacacccattgatcagtttgcaaagaactatctcggtcttcgcgtatcattcgcccgtctctcgccggacggaagcatctgcggtgtcactgcctatgccgacactgagtacaagatcacggaacttggtattacgcgcacactggctttgaagcgtaatcaggtcatcttggacgagagcttcattcgatccggcaacgtgcagcggctctgcgccaagcgcagatttacccttgcccacgagtgcgcccatcagattctcttccaactggaatcggaagaggtaaaggcttcctgcgaaatgaaatattccgcacggacagcctatacgccgcgagagctgaaaacccgcgaggactggaacgagtggcaagcaaatgtcttgggcgcggcgatcctgcttcctcaaaaagaggttgacctggcaatgcgtcggtttgcagaaacgccgctgatcaattacgaggggaggtattcgtatggtgatcacttaacgctgcgccttttctgccggttgttcggtgtctccaagacaacggcgtctatccgccttcgtcagctcggctacatggtagatcgtccattcagtgagtatgttgacccattggaggtgtggtaa

SEQ ID NO: 2652 - DNA, 1890 bp, Unknown
  Unknown gut bacteria
atggctgaaaacaaaaatgcacagcaagtccgcgaaatcacggacaagctggaacagggcatcaaggagctttttgaatccgagcggttcaaggaatatctccgcacgatgtccaagttctacaactattccttcaacaacacgctgctcattgcgatgcagaagccggaggcaacctatgttgccggttatacctcgtggcagcgcaactttgaccgtcaggtcatgaagggcgaaaagggcatcaagattcttgcacccgcgccgtacaaggcgcaggaagagcgtgagaagattgatcctttgacgcagaagccggtgatcggcgcagatgggaaggctgtcacggaaacggttgaggtcctgcgtcctgcctttaaggtggtgagtgtctttgatgtttcccagacggacggcaaggagcttccggacatcatcgtcgatgagctgaaaggcaccgtcgaaaactacgaggcgttcttcgatgcgctcaagcaggaatctcccgtccctatttcctttgaggacattccgggcggtgcaaagggattcttctcgccggttgaaagccgcattgccattcaggagggcatgagcgaagtccagacggtcaaaaccgccattcacgagatcgcccacgcaaagctccacgctgtcaagccggatgagaaagccgcgccagaagataagaaggatcggcacaccaaggaggttgaagcggaaagcgttgcctacaccgtctgccaacggtacggcattgaaacctcggactactccttcggttacatcgccggttggtcatccggcaaggaaaccaaggaactgaaaagctctctggacaccatccgcaagacggcggctgagatgatcgagggcattgacgccaagctcaaggtgctgctggcagagaaagcacagtccgcagagatggaagtcgaagctcccgtaaaggaagctgtttcggaggaaaagccggaagtccccatttaccgcgagacggcgaattacgcctatgaagccggtgagatggacgcatatcgtgcttctctcgccgcaaacgcggaatgccgccgtgcgattgaagcggcaatcagttctaactacggagacaaccggctggatgcggatgctgccgtgaaaagcgtccttgagcagttctctccggagcgcgtccggtatgtcctcgcaaacaccattcagcagaaagactttgacgggcgcattccgcagcctctcaaggagtgggcgaagagcgttgatgtctgcccggagaatgcctcccgcttccttgtggataaacccaatcccggactgacggcacttttcgtggatgcgttccgtcagcagaccgaaccccagaaggaagtcacttctgagaaaacagaggaaagagacccggaggttgttgcatgggagaacgatgagattgcctctattgaggtaaaaaccgtggaggtcaagtctccctttgcgcccttgccggaggaagcagcaaaagcaccgaagacacaccgcctgactgccgaagaaaaggagatcaaagccgccgtcatggacacgctcaaggggcagatcgcctataacaacgacggtatgcgggcgtcctatcgcgcctctaaccactccttcaatctgctggcacggaacggcgtcaggatcgagggcaacacggtcacgcagaacggtgagccgctgttcaaaattcatcgccgtcatgcggcgcggaaaacacagggctgttaccgtgagctgatgccgacgctggaatacgtcaagcaggagcagaagcaggaaaagccctctatccgcgatcagctcaggactgccgcaaaacagcagccggagaagaagtctcaggtcaaatccaaaacgcacgacatggagttgtga

SEQ ID NO: 2653 - DNA, 1203 bp, Unknown
  Unknown gut bacteria
atgcccgtattagatggtgattttgaagccttcgtcacgaaccttggcaagtacaacgagggtatgctggtcggtgagtgggtgaagctgcccaccaccgaggaagagatgcagaaggtctttgagcgcattgggatcggcaagcaggatgagttcggtcagccctatgaagagtggtttatcaccgactacgaatgtccgatctacggcgttcagaagatgcttggcgagtacgagagccttgataagctcaactaccttgccgctttgattgacgagctttccctgagcgatcaggaaaagctcgttgccattatggaggctggctgcgatgaggtcagcgacatcgacgatctcatcaacctgacgttcaatctggactgctacgacatcatgcccggtatcaacgacgaatccgatctcggctattattacgcacacgaagccggtatctactccgaaaaggatctcggtcctctggcaaattacatcgactatgaacgctatgggcgcgacattgcgatggatgagcagggacgcttcaccgatgagggctatgtccgtgtcgcaagcgaacgctgggacaggcagtttaacggggagcttgatgatattcccgatgaataccggattaccggctcaggggaagccgccgagcgtgacagcaccatcgccgttctcgtcgttgagccgggaaaggagccttatgtgaaggagattgactccggtctggagtccttgcagcatgaggtcggcggctatatcgaggcaatttatccctacgaagaccctgttgccttagtctgtaatgaggaaggcaagctggaaggtctgcccctgaaccgcgctctgcgtgatgaggatggtgacatctacgacgttgttgccggaacattcatggtagttggcttgacggatgacagcttcggctctctgaccgtagagcagatgcagaagttctctgaccacttcaaggtgccggagcagtttgttaagttgggcgataagattgtggcaatccccatgatctcgaaggagcagcagaagcaggaaagcatcgagcagaaggactttgagatgaatgccgacacctccggtctgacggttgccggtcacatcgggacgtggcacaccattgaccagcacgaagtcagcggtcacagcttttacctgatggagcatgacacctacggcgatgaagct

SEQ ID NO: 2654 - DNA, 1176 bp, Unknown
  Unknown gut bacteria
ggggagcttgatgatattcccgacgaataccggagcaccggctcaggggaagccgtcgagcgtgacaacactattgccgttctcatcgttgagccgggaaagaagccttatgtgaaggagattgactccggtctggagtccttgcagcatgaggtcggcggctatatcgaggcaatttatccctacgaagacccggttgccttagtctgcaacgaggaaggcaagctggaaggtttgcctctgaaccgcgctctgcgtgatgaggacggtgacatctacgacgttgttgccggaacattcatggtagttggcttgacggatgacagcttcggttctctgaccgtagagcagatgcagaagttctctgaccacttcaaagtgccggagcagtttgttaagttgggcgataagattgttgcgatccccatgatctcgaaggagcagcagaagcaggagagcgttgagcagaaggactttgagatgaacgccgatacctccggtctggcggttgccggtcacatcgggacgtggcacaccattgaccaacacgaagtcggcggtcacagcttttatctgatggagcatgacacctacggcgatgaggcggcttgcatcatcgtcgatgagcgcggtaagctcgtccttgatgatgtctacaacggctttgacgatgacacgctccgccttctcgaccttgaggtcaaggaagtgccggaaatgcccgatcccgcgctctccgttcaggatatgaaggactacggctacgcatgggctggcgttcttcccgccggtcaggaggcggctgagacggctttggagaagggctgcgaggtttaccgtctttattccgataacaccgagggcttgtgcgtagatgccaaagagattgccgatcatgcggcaaagggcggaatgctcggtatcagcaaggaaagctggatggcggctcttgagaaggaaaactacctcaaggcggcggagatgtcgatggaggatgactacggcatgattgatgggatcatcaacaacggtccgaaggaggacaagaccgcagaggtcaaagcccccgaaagggtcgaaaagtcctccatcatggacaggctcaagtccgcaaaggctgaaaagcagaaggaatgctgccctccaaaaaagcacaaaggagagattgagctgtga

SEQ ID NO: 2655 - DNA, 498 bp, Unknown
  Unknown gut bacteria
accgcaatgcaggatgaagtcaacaccaaagttgttgcaatcatgatcaagggcggcaaaatctcagccgaggtgctgaaaaaggcactggacaagttcgtgcaggagattgagaaggcacagaagcagatgcagcagcccaaaacctatcgcggcaagcagtccatcaagcatctgatgagccagaacgccgccatctccaacatcgaagtgacggacggcaacatcaagtcctttgagcggactgccagcaaatacggtctggactttgcgctcaagaaggacgtttccgtagagccgcccagctatcttgtcttcttcaagggtcgggacgttgatgtcatgaccgccgccttcaaggagttctccgccaaaaccgtcaagcagaaggaacagccgtccatccggcacaagctggatcaggagaaagctcagagcaaggcgcagcacaaggagaaggtcaaggtcaaaaccaaggatcggggtgtggagctgtga

SEQ ID NO: 2656 - DNA, 399 bp, Unknown
  Unknown gut bacteria
gaaaggaggaaacagtcaatggcatttgttccggtcccgaaggatcttaaccgcgtcaaaacgaaggtcatgttcaacctgaccaagcggcagctcatttgtttttccatcgctgcggcggtcggcgtcccgatcttctttctggcgaaggtgcatctcgacttgtctacggcggcaatgctgatggtggtcatcatgctcccgttcatcttcttcgcgctttacgagaaggacggtcagcccgccgaaaagtatctgtaccacatcgtacagtccatgttcatccgggacaaggtgcgtccctaccgcacaaacaatctctacgctgagattcagcagaaaatcaaagaacaggaggaattgcagcttgaacaacagcacagcaaaggcaaagcctaa

SEQ ID NO: 2657 - DNA, 2016 bp, Unknown
  Unknown gut bacteria
atgaccgtcaagaacggcgtcgtttatggcgatgccctttccgctcaggaaaagaagcggatcgtcatgcagaagaaaaaggacaggaaggcaaagaaagtccgcaagtccgcccagcagaccattccctatgtggagatgtgccgcgacggtatctgcaaggtgaacagccgcctctacacgaagtccatcgcctttgaggacattaactaccagcttgcgcagaacgaggacaaaactgccatctttgagaactggtgcgactttctgaactacttcgacagctcgattttcgtccagctctccttcatcaatcagaaggcaagtctcaatgagttccgcaagcgcatcaacattccggcacaggaggacgccttcaacgacatccgctccgagtattccggaatgctgcaaagccagctcaccaagggcaacaacggactggtcaagaagaagtacatcaccttcggcattgaggcagactccctccgcacggcaaagccaaagctcgaacgcattgaaaccgacattctcaacaacttcaaaaccctcggtgtgagaaccgagccgctgtccggctatgaacggctgaaagtgcttcatgatgtgtttaacatggacaccaatgagccgttccgcttttcctttgacatggtagcccggacgggactcagtacgaaggatttcatcgcgcccacttcctttgacttccgtgaaggcaagtgcttcaagatgggcagaaccatcggcgcgatgagcttcctgcaaatcctcgcgccggaactcaatgaccgtatgcttgccgacttccttgagatggacagcaacatcacggtcaattttcatatccggacgattgaccaggcaaaggcaatcaagagcatcaagatgaagatcaccgacctcgacaagatgaagatcgaagagcagaaaaaggcggtccgctccggctacgatatggacatcatcccgtccgatcttgccaccttcggcggtgaggcaaagcgtctgttgcaggatctccagacccgcaatgagagactgttccttgtgaccatcctcatcatgaatacggcaaccaaccgccagaagctcgaaaacgcggtgttccagaccgccgccattgcccaaaagtataactgtgcgctcaagcgtcttgacttccagcaggaggaagggctgatgtcctctttgcctatcggcgtcaatcaggtggaaatcgaacgaggactgaccacttccagcacagcggttttcgtgccgttcaccacgcaggagctttttcagggcggcgaagctctctactacgggctgaatgcgctgtccaacaacatgatcatggttgaccgcaagcagctcaaaaaccccaacggactgatcttgggtacacccggttccggtaaatccttctccgccaaacgcgaaatgacgaacgccttcctcatcacggaggatgacatcatcgtctgcgaccccgaagccgagtattttccccttgtgcagaagctcggtggtcaggtcatccgcatctcaccggtcagcacggattacatcaatccgctggacatcaacacgaactactccgaagaggaaaacccgctgacgctgaaatccgacttcatcctctctatgtgtgagctgattgtcggcggcaaggacggcttgcagccggttgagaagaccatcattgaccgcagtgtccgcatggtctatcaggattttcttgcagaccccaaaccggagaaaatgccgatcctcgaagacctctacaacattctgagaaatcagaaggagccggaggcacagcgcatcgcaactgcccttgaaatctacgttcacggctctctgaacgtcttcaatcacagaacgaatgtggatgtcaacaaccgcttcgtctgctatgacatccgggaactcggcaagcagctcaagaaactcggtatgctgattgtgcaggatcaggtgtggaacagagtcaccattaaccgcgcccagcacaaggcaacgcgctactac

SEQ ID NO: 2658 - DNA, 870 bp, Unknown
  Unknown gut bacteria
ttgggcagcattttagaaaagatcgaacaagctctcaaggatatgctgatcggatggatcgagagcaacctgaccaatatgttcaccgatgtcaacgagaaggtaggaacgattgccgccgaagttgggcaaacaccgtccggctggaacggcggcgtgtaccagatgatccggggactatctgaaaacgtgatagtccccatcgctggtatcatcatcaccttcgttttgtgctacgagctgatttctatgatcaccgagaaaaacaaccttcacgacatggacacatggatgttcttcaagtggtttttcaaggcggctgtggcgatctatctcgtaacatacacgtttgacatcgtgatggcagtattcgacatcgggcagaacgtggtttccggtgcagcaggagtaatccacggcaaccccagcattgaccttgacgcgacgattgcgcagatgcgtaccggcatggagaacatgggcgtcggagaactgctcggactgtcgatagaaacgcttctgatcagcctgtgccttaaaatcatggcgatcctcattacggtcattctctacgggcgcatgattgagatttactgcaccgtgagcattgcgcctattcccatcgcaaccatgagcaaccgcgaatggggcagcatcggcacgaactatctgaaaggcttgttcgctctggcatttcagggctttctcatcatggtctgcgtcggcatctatgcggtgctgatcaacggcatgatcatcgcagacaacattcattcggctctgttctctgtggcagcgtacacggttattctgtgcttctcgctgttcaagaccggaagcctcgcaaaatccattttccatgcgcactaa

SEQ ID NO: 2659 - DNA, 2070 bp, Unknown
  Unknown gut bacteria
ttgatcttagtcattgctgaaaagcccagtgttgcccagtccatcgcaaaggtgttgggcgcgacgtcccgcaaggacggctacatggagggcggcaattacatcgtttcgtggtgtttcggtcatctggtggagctggcagacgccagctcctacgatgagcggtatgccaagtggcggtatgacgatctgcccattgttccggaaagctggatgtttgaggtcacgaaggacaaagcacaacagttcaaggtgctgtcctctcttatgaaggacaagcgcgtcaccgagctggtctgcgcaaccgatgcagggcgcgagggtgagctgatcttccggctggtctacaacaaagctggatgcaccaagcccttcaagcgtctgtggatcagctcgttggaggactccgccatccgcgaaggcttcaatcatctccgagacggcaaggaatatgaccgtctctatgaagcagcactcagccgctcgaaggcggactggatcgtcggcatcaacggcacccgccttttcaccacgctctatcacaagaagctggtagttgggcgtgtccagacgccgactcttgcaatgctggtagagcgcgacggaaaaatctccacgttccagaaggagaagtatttcaacgtccatgtcggcaagggcgatctgactgccgatctggaaaaggtcaaaaccgaagaggaagcaaagaagattgcggcggcttgcgagaaaaagcaagccgtcgtttcttctctcaagcaggaaacgaagacggtcaatcccccaaagctctatgatctgaccaccttgcagcgcgaggcaaaccgatactacggcttcactgcccagcagacgctcgatctcgtacaaacactctacgaaaagaagctcctgacttatccgcgcacggacagtcagttcatcacgggcgatatggaggacactgcccgtcaggtcatttctatcgtctgccgccagcttccgcttttctccggcgtttcggttactccggacattgcccgcgtaaccgacaacagcaaggtcacggatcaccatgccattctcccgaccgttcagctcgaaaagcaggatgtttccgcgctccctcagtcggaacagaaaatcctcaatcttgtcgggatgcgccttctgtgtgcgaccggtgagaagcacacctacgcagaaacgcagatcacgctctcctgcgagggctacgagttcaaagccaagggcaagaccgtcgctcaaaacggctggaaagccgttgaagagctgttcaaggcatctctcaaggcgaaggaaaaggatgatcccatgaagtccctgcccgaagtccatgagggcgatatgctggaaggtgtgtctgccagtgtcaccgaacacttcacaacgcctccgaagcagtacacggaagataccctcctgtctgcaatggagactgccggaaacgatcagtttgacgatgacaccgagaagaaaggtctcggcactcccgcgactcgcgccggtatcattgaaaagctggtgaagtccggctttgcagagcgtaaaggcaaatccctcattcccacaaaggacggctgcaaccttgtctgcgtcctgccggaacagatcacctctcccgcaatgacggcggaatgggaaaacacgctcatggagattgagcgcggcaaggcagatgcagacgccttcctcagcggcattgtccagatgaccggcgatctcgtaaaagcctatccgtttctctccgatgccgaagcccagcgtttcggcacgggcaaggaggaaatcggcaaatgtccccgctgcggctctccggtctatgtcggcaagggcaacttctactgctcgaacaaggactgctccttctgcctgtgggaagacaacaagttcttttccagcaagaaaaagaagctgaccaagaggattgcaaaggagctgctggacaagggctggtgccgagtgaccgggctttacacgccgaagaagcctcagctctacgatgcggtgattcgtctggatgacagcggcggcaaatacgtcagcttcaagatggagttcgaccgatga

SEQ ID NO: 2660 - DNA, 2205 bp, Unknown
  Unknown gut bacteria
atgtccaatgaaccggaacttaaagcccgcgacaaggtagtcgtgcggatgacgcgggagggcgcggtcgaggaaaacctgacggctggcaccgaacagcgtgtgtcaaagaggctggaagatgcggagctggtgaagcccggtgagacagtcgagccttccgaagctctttctgcggaggaacagaaaaaggtgcagatgcgccgtcagcagcgtcagtttcagacggaacacgccgaagataacgacacacagccgccctcggaaacgtccgtcacagaagagaaaagggcagaaaatccaccccagaatgtacctgaaccgctgccctcggaaacgccgttcaagcatccaactttagagcagcacggcgtttcttctcataccggcacggtgattgctgaaacggttgtcacacacaagctgcgcaagacctcggcagtggaggcagtggatgcggatgccgttctctcccaagcggcggagacttcctccgcaaagccggtctcggacgatgcagtcccgcccacgaagcggatgcagaagctcgaaaggaagtccgagaaggcgcatgagcgtctggacgctgcccgtgagaacctgcccacgcacaaggttctcaagaaagagcgtgtcttcgatgaagagaccggcaagggcaaaacccgccttcattttgaggatgagctgaaaaagccaaagtgcaaaggcaagctgcaatttgagacggataaaaccgtccgcaaggtcggtgacactctcgcctccggcattcacggcaaaatccatgaggtcgagcaggaaaactcggcggttgaggcggcgcataaaacagagatcgccgctgagactgccgctcgtcatttcagtcatcatcgggaaagcagcgtcaacaagccttatgagaaggtctccaagctggaacacaaggcggatgctgctgatgcgaagctccaatatgaaaaaaatcagcaggagcatcctgagatgaagaagcagaacatgaacaagcactaccagaagcagagcatcaagaaggaatatgccgctgctcgaaatgccggttctcagaccgccgggactgcaacaaagagcaccggcaagaagctcggtgagaaggcgtccgacaagatcaaggagttctttgagaagaacaagaaggtcttcatctggatcggcgtcggaattgcccttctcgttttgctcggtgccggaatcagctcgtgttcgatgctcacctctaccggctcgtcggttatcgcttcctcttatctcagcgaggatgacgcgatgctgggcgcggaggcgcagtattgccggatggagcaagagctgcaacgctatctcgacacctacgaaagcactcatgactatgacgaatatcacttcgatctggatgatattgagcatgacccctatgtgctgatctccattctctcggctctccatgagggcgagttcacgctggatgaggtgcagggtacgcttcaaatgctgtttgagaagcagtacatcctcaccgaagaggtcatcgtcgaaaccagataccgcacggagaccgacacatggacggacgcagacggcaacacgcacacggaaacctatcgcgtcccgtatgactactacatctgcaacgtgaagctcgaaaacttcaatctctcccatgtcccggtctacatcatgtctcaggaacagctttccatgtacgcaacgtatatgtcggtgctgggcaaccgtgaagatctgtttggtgactctccctatgtggacaagtacatcacaaatccgcccgctgactacgatgtcaacccggaatacctgaacgacgagaagtttgcagcgctgattaccgaggcggaaaagtatctcggctatccgtatgtgtggggcggctccaatcccgacacgtccttcgactgctccggctttgtcagctatgttctcacgaacagcggtcttgtgaacaccggacggcttggcgcacaggggctttacaatgtctgtgcgccggtctcaaaggcgaatgcacagcccggtgatcttatctttttcgtcgggacgtatgacacccccggcgtgtctcacgtcggcatctacgtcggtgatggggtcatgatccactgcggcgaccccattcagtacacatccatcaactcttcctattggcagcagcatttctacgccttcggaagacccgcctattaa

SEQ ID NO: 2661 - DNA, 1029 bp, Unknown
  Unknown gut bacteria
atgcccattgaaatgttgtcgggtttcacagccaacatttcaatggaaacacaaatccaacagaacaggaggtacaccaccatacaacttgacatcattcataccggcgattgccttgaaatcctgaaaaccctgcccgatgacagcgttcattgctgtgtgacgtcccctccgtattacgcgctccgcgattacggtatggaggctcagatcggcagagagacaacgccgaaggaatatatctcgcgcctgacggaagtgtttaccgaagtcaggcgcgttttgcgtccggatggaacgctctggctgaacatttcggacacctacgctgggaaaggcaatcagggtgattttattgacccgaagaaccccaacggcagaaacggtcaggctgtggctctcaacaacaaggttgagggctgcaagccgaaggacatgatcggtattccgtggatgctggcgtttgccctccgtgataccggctggtatctgcgcaacgacatcatctggatgaaggataaccccatgccggagagcgtgaaagaccgctgcgcccgctgctatgagcatattttcctgttctccaagtccaaaaagtatttcttcgactacaaggcaatctccgagccgattgcccccgcaacggcagaacgcctcaagcgcggcatgaagggcggcaacaaatacggcaagcccgttcccggtcagcctcagccgcagtccatcaaccgcccccgtgagcatggcgagatcaaggacgcagacatcaatccgctccgcaataagcgcgatgtctggaagatcaacaccgtccccttcaagggcggtcattatgccgcctaccctccgaagctggttgaaacctgtcttctcgccggttgtcccgaaggcggcattgtgcttgacccctttatggggagcggcacaaccggcatggttgccgcgcagatggggtgtcatttcgtcggcatcgagctgaactctgaatacaccgagcttgcctacaagcggattggaggtgaaatctga

SEQ ID NO: 2662 - DNA, 261 bp, Unknown
  Unknown gut bacteria
atgccgcttcaaattgtcagaaatgacatcacaaaaatgaaggtggacgccatcgtcaacgctgccaacgagtcgctgctgggtggcggcggtgtggacggctgcattcatcgtgccgcaggacaggaactgctggcagaatgtgaaacgctccacggctgcaagaccgggagcgcaaaaatcacgaagggctacaagctgccctgcaaatatgtcattcacgcagtcggtccgcgctggtatgacggacggcatggggag

SEQ ID NO: 2663 - DNA, 1773 bp, Unknown
  Unknown gut bacteria
atgcccgtattagacggtaattttgaagccttcgtcacaagcctcggcaagtacaacgagggtatgctggttggtgagtgggtgaagctgcccaccaccgaagaagagatgcagaaggtctttgagcgcatcgggatcggtcagcaggatgatttcggtcagccctacgaagagtggtttatcaccgactacgaatgcccgatctacggcgtccagaagatgcttggcgagtatgaaagccttgataagctcaactaccttgccgctttgattgacgagctttccctgagcgatcaggaaaagctcgttgccattatggaagccggttgcgatgaggtcagcgacatcgacgatctcatcaacctgacgttcaatctggactgctacgacatcatgcccggtatcaacgacgaatccgaccttggctattattacgcccacgaagccggtatctactccgaaaaggatctcggtcctctggcaaattacatcgactatgaacgctatgggtgcgacattgcgatggatgagcagggacgcttcaccgatgaaggctatgtccgcgtcgcaagcgagagatgggacagacagttcgacggcgatcttaatgatattcccgacgaataccggatcaccggctcaggggaagctaccgagcgtgacagcaccattgccgttctcatcgttgagccgggaaaggagccttatgtgaaggagattgactcggatctcaagtccttgcagcatgaggtcggcggctgcatcgaggcaatttatccctacgaagaccctgttgccttagtctgcaatgaggaaggcaagctggaaggtctgcccctgaaccgcgctctgcgagatgaggacggtgacatctacgacgttgttgccggaacattcatggtagttggcttgacggatgacagcttcggctctctgaccgtagagcaaatgcagaagttctctgaccacttcaaggtgccggagcagtttgcaaagctgggcgataagattgtggcaatccccatgatctcgaaggagcagcagaagcaggaaagcatcgagcagaaggacttcgagatgaacgccgatacctccggcttgacggttgccggtcacatcggaacgtggcacaccattgaccagcacgaaagcggcggtcacagcttttatctgatggagcatgacacctacggcgatgaggcggcttgcatcatcgtcgatgagcgcggcaagctcgtccttgatgatgtctacaatggctttgacgatgacacgcttcgccttctcgaccttgaggtcaaggaagtgccggaaatgcccgatcccgcgctcactgtgcaggatatggaggattacggctacgcatgggctggcgttcttcccgccggtcaggaggcggctgagaaggctttggagaagggctgcgaggtttaccgtctctattctgataacaccgagggcttgtgcgtagatgccaaggagattgccgaccatgcggcaaagggcggaatgctcggtatcagcaaggaaagctggatggcggcacttgagaaggaaaactacctcaaggcagcggagatgtcaatggaggatgactacggcatgattgatgggatcatcaacaacggtccgaaggaggacaagacccttgatgccaaagcccccgaaaggggtgaaaagtcctccatcatggacaggctcaagtctgcaaaggctgaaaagcagaaggaatgctgccctccccaaaagcacaaaggagagattgagctgtga

SEQ ID NO: 2664 - DNA, 225 bp, Unknown
  Unknown gut bacteria
atgaagagagcatctattcgggttcaggaaccgacgccggagctgatcgaaaaaatccgcagggcaagagttgccatttcccagcagaagccccgatacctgaaatgtccctattgtcagcataatgccattgctgtctacgaggacacgaggggtcatgtagaatccaagtgcaagaaatgcgggcggatcacagtctttgatgtgctgaacatgagaagactg

SEQ ID NO: 2665 - DNA, 1029 bp, Unknown
  Unknown gut bacteria
cagcaggaagaagggctgatgtcctctctgcctatcggcatcaatcaggtggagatcgagcgcgggctgaccacttccagcacagcggttttcgtgccgttcaccacgcaggagctttttcagggcggcgaagctctgtactacgggctgaacgcgctgtccaacaacatgatcatggttgaccgcaagcagctcaaaaaccccaacgggctgatcttgggtacgcccggttccggtaagtccttctccgccaagcgtgaaatgacgaacgccttcctcatcacggaggatgacatcatcgtctgcgaccccgaagccgagtattttccccttgtgcagaagctcggtggtcaggtcattcgcatctcaccggtcagcacggattacatcaatccgttggacatcaacacgaactactccgaagaggaaaacccgctgacgctgaaatccgactttatcctctccatgtgtgagctgattgtcggcggcaaggacggcttgcagccggttgagaagaccatcattgaccgcagcgtccgcatggtctatcaggagtttcttgcagaccccaagccggagaaaatgccgatcctcgaagacctctacaacattctgagaaatcagaaggagccggaggcacagcgcattgcaactgcccttgaaatctatgttcacggctctctgaacgtcttcaatcacagaacgaatgtggatgtcaacaaccgctttgtctgctatgacatccgcgaactcggcaagcagctcaaaaagctcggtatgctgattgtgcaggatcaggtgtggaacagagttaccatcaaccgcgcccagcacaaggcaacgcgctactacatggacgagttccaccttttgctgaaagaggaacagaccgccgcgtacagcgtggaaatctggaagcgtttcagaaaatggggcggcatcccgaccggaatcacgcagaacgtcaaggatctgcttgcgtcccgcgaggtagagaatatctttgaaaactcggattttgtctacctt

SEQ ID NO: 2666 - DNA, 555 bp, Unknown
  Unknown gut bacteria
caacatgaaaggggtgaaggtcccgtgataattcgctccgaggaaatatacaaaaaggcgaacagcattgtcaaaagctgtggaacaagagataccttgaagattgcccgtgagctgggcattcatctccattttcttgacaatctgaacgatctgctcggaatgtacacctaccgccataaagagcggcatattcttctgaactccaacatggagtatctgatcatgcaaatggtttgcggtcacgagatcgggcatgatacctttcaccgtgatcttgccaaaggaaacgaaccgctcccggagttcgtgctgttcgatatgcgcacaaaacacgaatatgaggcgaatgcgtttgcctcacacctgatcattgacgatgatgagctgattgacctgatgaagcaggactacgatgtggtgcagctctcggctgcaatgggaacaaacatcaacctgatgctgatcaagctcaacgagctgaaccgcatgggctggcagctcaacttgccttatgtaccgcactctgacttcctgaaaaatgtcagaccggag

SEQ ID NO: 2667 - DNA, 1686 bp, Unknown
  Unknown gut bacteria
gtgtttcgtctcgctcccggcacggagttcatcgacaagctgacaaacggctttgctgtattcggcactgcctttgcaaatccgcttcccagctttcatcccgtcgatctgctcatcggtctgattgccggtgcgctgctcaagctggcggtctacgtcaaaggcaagaaccgcaagaagttccggcagggcgaagaatacggatctgcccgatggggcaagccggaggacatcaagccgtacacggacccggagttcgctaacaacgtcattttgacgcagacggagttcctgaccatgaacagccgcccgaagcagccgaaatacgcccgcaacaaaaatatccttgtcatcggcggttccggctcaggtaagacgcgcttttttgtcaagccaaacctgatgcagatgcacagcagctatgttgtgactgacccgaagggtacggtgctggtggagtgcggaaaaatgctcgaaaaaggaggctatgtcatcaagtcgctgaacaccatcaacttccggaaatccatgcactacaacccgttcagctacatccgcagcgagaaggacatcctcaagctggtcaatacgatcatcgtcaacacgaagggagatggcgataagtccggcgaagatttttgggtgaaggcggagaagctctactacacagccctcatcggctacatctggtacgaagcacccgaccacgagaaaaactttactactctgctcgaaatgatcaatgcctcggaagccagagaggacgatgagaccttcaagaaccccgtggatgtcatgttcgatgagctggaagcccgcgaccctgaccactttgcggtcaagcaataccgcaaatacaagctggcggcgggcaaaaccgccaagtcgattttgatttcctgcggtgcaaggcttgcgcccttcgacatcgcagagctacgggagctgatgagctacgatgagatggagctggacaccctcggagacagaaaaacagccctgttcgtcatcatttccgacaccgatgacaccttcaacttcattgtggcaatcatgtattcccagctcttcaaccttctctgcgacaaggcagatgacgtttacaacggacggcttcccgtccatgtgcgctgtctgctggatgagtttgcgaacatcggtcaaatcccgaagtttgataagctcatcgccaccatccgcagccgggaaatctcggcgtcaatcatcttgcagtcccagtctcagctcaagaccatctacaaggatgcggcggacaccatcacgggcaactgcgactgcacacttttcctcggcggaaaagaaaaatcgaccctcaaggaaatcagcgaggtgctgggcaaggagacaatcgacctttacaacacctcagaaacccgttccaacaacaactcctatggcttgaattatcagaaaaccggcaaggaattgatgtctcaggacgagatcgccgtcatggacggagctaagtgtattttgcagcttcgaggcgtgagaccttttctcagtaacaaatacgacattacgaagcatccaaagtaccggcagctctccgactataacaagcggaacgccttcgacatcgagaaataccggcagcacaagctggtagtcaagcccgatgacacattcgacctctatgatatgggcgaggtcgaagcggattaa

SEQ ID NO: 2668 - DNA, 240 bp, Unknown
  Unknown gut bacteria
aaggaaaggatatggaactctgatatgaaaaactttaccgtggaagaaatcaacctgatgtgttgcttcaatacgtccagccggaagcggctgatcgacgatatgaagcgcgtcactctgaacgacatggacggcgaaatcgcagagctgatgtataagaccatccggaagctcgaatccatgagcgacgcggagtttgaggaactgtatatcatgccggacggcatggtagatgactga

SEQ ID NO: 2669 - DNA, 1608 bp, Unknown
  Unknown gut bacteria
atgagcaaggaatacaacatcggcatctacatccgcctctcaatggctgatgaagataccggctatggcagcaaggcggaaagtgacagcatcggcaaccagcgtatgctcatcaatcgctttctcgacaatcatccggagttgtctcactgtcagcgatctgagtttgcggatgacggttataccggcacgaactttcaccgtcctcagttcacgcagatgatggagaaggtcaagcgcggggagattaacctgatctgcgtcaaagacttttcccgcttttctcgtgactacattgaaacgggaaactatctggaatgcacctttccgttcatgggcgtccgctttatttccatcaacgacggctatgacagcgacgattacaaaggcacaacgggcggtctggaagtggttatgcgcagcatcatctatgcggcatacagcaaagacctctccgtaaagaccacatcggcaaaaatccagatgatgaagcaaggcaagtatgtcggtggctacgctccatacggctacgtcctgcatccaaccattcggaacaaacttgccgtagacccggaggcggctgatgtgatccgtcgtattttccgcgaggcgctggaaggcagcaacacctctcagatcgcccgcagcctgaatgatgacggcatcccgacaccggggcaatacttcaagagcaagcatcccgacaagaagaagttcagtaacatgagcgagaaaatcagttgggaaaccgtgatggtctataacatcctcaaaaaccttgtttacaccggaacgctggtcagccgcaaaatgaagtcctgtggtgtcggctcaaaaaagcgtgttgtcaatgagccgatcatcgtagaaggaacccatgaagctattatcagcaaggaagactttgagcttgctcagaaggtcattcgaggcggaggacggaatcccacgcgcaagcagcatgactatccgctcaagggactcgtccgctgcggaaactgtaaacgtgctatgacgcgccggaagaacaaggctggcattcggtacttccagtgcatccactcggtcaacaacggaaacacagactgtccggttggcaggagctttccggaaatggatattgagaaggttgtcttccatgccattgctcagtttctcgctttggcacagaaggaagcagtccaaaaccgagaagtcggtgatcttcggaaatctgccatcaaggaatgcgctgataaaatccggattcttcaaaagcagaacgagcagcacaaggcgtccaagctgaggctctacgaaaagtacgcagccggaagtatcacgaaggaagcgtacattcagcaaaaggcggcaacggacacgaaaattgctgaaaacgatgaagcaatccagtgcagtcacaaacggatgaaggagcttgactccgagacctcctgttcggatgaaaagctggatgctgtctgcgatcagtacgctgactgcaaagctctgacctatgagctgacccacgcattcatttctgcggtctacatttacgatttcgacaacatagaaatcgtctggaagttcaaggacttcctcaatacatcagaaggagaagccaaatga

SEQ ID NO: 2670 - DNA, 1857 bp, Unknown
  Unknown gut bacteria
atgccaggcaaggtttaccgcacggcgatctactgccgtctgtcccgtgaggatggagacaaagtagaaagcaactccatcgccagccagagagccatctgcgaggactatatcgcaagacatgaggatttggagcttgtctgtgagccgtttgtggatgacggttacagcggcgtttccttcaatcgtcctcagttcaaaaagatggaagaggcaatccgcaagggtgcgcttgactgcattgtagtcaaggatctcagccgcttctcaagaaactacatcgacggcggacgttacattgagaagatattcccgcagctcggcatacgcttcatcgcaatcaatgatgcgtatgacagtctgaccggtgatccgcagtccgactcctttgttatcccgttcaaaaacttgattaacgattcttactgcaaggacatctccatgaaaatccgaagcagtctggaagtcaagcagaagagcggtgagttcgtcggttcgttccccccttacggctacatgaaatcgccggagaacaaaaaccagctcatcgtggatgaagcggtcagcgaatatgtgcagatgatcttttccatgtacaaggacggcttctccattgggcgcattgcaaagcgtctgaaccagatgggcgtcctgtccccaatggaatacaagcattccgccggtgtaaagttcgataccgtcttcaaaaccggcgataccgcaaaatggacatacaaagccgtccagcgtattctcaccaacgaggtttatatcggcgttctggcgcaaggcaagcgcggcactcccaactacaaagtccgcgttgtgaaaagcaaggatgaatccgagtgggtcaaggtagaaaatgcgcatgaagctcttgtgtcctacgaggacttcatggcagtcaaggtcatgatgcagcgggatatgcgctgttcgcccgatcaggacgaagcgcatctgttttccggcttcctgttctgcggagactgtcagcagccaatgatccgcaagaccgtcccgtcgaagacgaaaaagtatatctactacgtctgctccaccaataagcacagccggacgtgcagcccgcacagcatcgccgcaaaagaggttgaggaaaaggtcttccgtgccattcatgaccagatcgagcttgtcatcaatctggaacacgcgcttgcgatgatagaacggcttccgtctcagagccgtaaggctttcaattacgaagctcagatcgccaaaatcgaggaagagattgagcggtaccaaaagctcaagctggggctttacgagaacttcatcggcggcgtcattgataagtcggaatactttgagttccgcaacagctacaccaaaatcattgagaacaagcaggacgcgcttctgcgggtcaaaaaagaaatgaagcagacggtgacaaccggcacaaccgaacgaaactgggtaacgcttttcaagcagtatgaaaacgtcgaagagctgaaccgccgtgtgctgatgtcccttgttgaccgcattctgattcacgaaaaccatgcaatcgaaatcgtcttcaaatacagggacgaataccagcagacgcttgaatacgttctcggctatgccgatgaactggatattggcgtagaagggaggggtgagaaaatggcaagaaaaagcagaaagcaaattgcagtcgaagagccggttatcgaatctgtctcttccgaggtcttctcaacagccatctatgcccgtctttccgttgaaaacagcggcaagtctgaaaaggtggatgtcatcgcaaatcagattgagatttgcaagtcgtacattgcagagcgtccctacctgaatctgatagatacctat

SEQ ID NO: 2671 - DNA, 303 bp, Unknown
  Unknown gut bacteria
ttcaatctctcccacgtcccggtctacatcatgtctcaggaacagctttcgatgtacgcaacgtatatgtcggtgctgggcaaccgcgaggatctgttcggtgactctccctatgtggacaagtacatcaccaatcctcccgccgactacgatgtcaacccggaatacctgaacgacgagaagtttgcagcgctgattaccgaggcggaaaagtatctcggctacccgtatggtgcaacttgttcccaactgaaaaggttgggcacttgtccaatgattggaggtgaaaagaaagacaggtga

SEQ ID NO: 2672 - DNA, 384 bp, Unknown
  Unknown gut bacteria
atgcttgttgggatagtcccaaacccttctaatctttacgacggagggcgcagcatggtacgaagaacacgagacattcagaagaagatttggctgacaccacaggaagaacgaacgattgcaaagaagatggaaatgatcggcacggagaacttcggtgcgtatgcaaggaagatgctgatcgacggttacatcattgtcgtagactacacagagcagaaaaagctcgccgccgaaatcaacaagatcggcgtgaacatcaataccgtctgccgcaggatcaactcgacgggacgattctatcaggacgatattgacgagctgaaagaaaagatggacgcggtatggcagttactaaaatcaaagcaatccgaggaactttga

SEQ ID NO: 2673 - DNA, 243 bp, Unknown
  Unknown gut bacteria
atgatgggcattgaaacaatgaaaaacgtcagcccgaaaacggttgaccgtagcacactcgttcagagaagcagcatccggcttgatcctgcggcaccgcgagaggacaggctgagggagttcatcaagcagatcagaaatccctactgttatctggacgggaagacagtggtgaagatcagcttcgccgagacggacacgacaatggaagattgtctggaacactatctgagaggtctttga

SEQ ID NO: 2674 - DNA, 327 bp, Unknown
  Unknown gut bacteria
atgctgccgaagatcatccgtaccggcatacaccggtatgagggaacaggagtgagaaaaacagaaatggctacacagtacagaaaagcatacgtcccggttacgctggatgtggacaaggagggggcaatcctccctcgccttatctggtgggacaacggtgtaatctttcaaatcgaccagattctatacaaatgccgcgccacatccaaaaaggttgggggcggaggcatccgttacacagttcagattcgcggaaaggagtcatttcttttccacgaaggagacaagtggttcgtcgaagcaaaggaggacaactgctcatga

SEQ ID NO: 2675 - DNA, 1137 bp, Unknown
  Unknown gut bacteria
cagttcatcatggatgatatggaggacactgcccgtcaggtcatttccatcgtctgccgccagcttccgcttttttccggcgtttcaatcactccggacattgcccgcgtaaccgacaacagcaaggtcaacgatcaccacgccattctcccgaccgttcagcttgaaaagcaggatgtttccgcgctgccgcagtcggaacagaaaatcctcaatcttgtcgggatgcgccttctgtgtgcgaccggcgagaagcacacctacgcagaaacgcagatcacgctttcctgcgagggctatgcgttcaaaaccaagggcaaaagcgtcgttcaaaacggatggaaagccatcgaggagctgttcaaggcttccctcaagacgaaggaaaaggacgatcccatgaagtccctgcccgaagtccatgagggcgatatgctggaaggtgtgtctgccagcgtcacggaacacttcacaacgcctccgaagcagtacacggaagacacgctcctgtctgcaatggagactgccggaaacgatcagttcgacgatgacaccgagaagaaaggtcttggaacacccgcgacccgcgacggtatcattgagaagctggtgaaatccggctttgcagagcgtaaaggcaaatccctcattcccacgaaggacggctgcaaccttgtctgtgttctgccggaacagatcacctctcccgcaatgacagcagaatgggaaaacacgctcatggagattgagcgcggcaatgcggatgcagacgccttcctcagcggcattgtccggatgaccggcgacctcgtgaaagcctacccgtttctctccgatgccgaagcccagcgtttcggcacgggcaaggaggaaatcggcaaatgtccccgctgcggctctccggtctacgtcggcaagggcaatttctactgctcgaacaaggaatgctccttctgcctgtgggaagacaacaagttcttttccagcaagaaaaagaagctgaccaagaagattgcaaaggagctcctggacaagggctggtgccgcgtgaccgggctttacacgccgaagaagcctcagctctatgatgcggtgattcgtctggatgacagcggcggcaaatacgtcagcttcaag

SEQ ID NO: 2676 - DNA, 351 bp, Unknown
  Unknown gut bacteria
ccggagggtgctgctgcacacttccggcagaaggaggatatagtgggtgctatcaaagtcttcttgaaggaggttgtgcttccaatcgcgcttgcgttctgcctcgcgtcatttctcaagccgatctatatgcctgacggcgtatgtgactacttccttatgtggatctgcgtcggcttgccattcggcatccggaggatgtgcctctggctcgttcccagcggctacggtatctccggctcagtcggcatcttcgcattgaacttaatcataggcggtcttatcggaggacttgccttcttcatcgggctgctgctcggtgtcattcataccatccgagaaatcatctga

SEQ ID NO: 2677 - DNA, 384 bp, Unknown
  Unknown gut bacteria
cccaaccacaccccccccgccgttaggtacactaaatgcaaaggtggtgaggctatgcgagagaagaaggacatcaatattgaaatcggcggcaatattcaagtggcaagagaacaggcgggctatacgcaggacacgctctcagaaatgcttggcatgacgccgaatcacctgagtgctattgagcgtggtgcttccggtatttctcttgaagccttgcagcgtctttgccgtttgctgggcgtcagtgcggaccgaattatctttgggaccgatgagccagaagcggaagcccttgagcttgccagacggatttcggatataaagcaggaataccggcaacaggttcaagagctgctgtccgctattttgaatatgtcataa

SEQ ID NO: 2678 - DNA, 480 bp, Unknown
  Unknown gut bacteria
atgagcaagaaacttgtagcgtatttttctgtgtccggcgtgaccgcgaaggttgccgagacgctggcagaggcaatcggcgcggacatctttgagattgagccgaaggtgccttacacggaagctgatctgaactggatggacaagaaagcccgcagcacgattgagatgaacgatcctgcctctcgtcctgagattgccgtcaagcgggacaacatgaaggactacgataccatctctgtgggcttcccgatctggtcgtatttcgctccgacgattatcaatacgtttcttgagagctatgatctgaccggcaagacgatcatcccgtttgcaacctccggaggaagcgacattggcaagacgaacgaacgccttgcgccgagctgcaaaggcgcaaagctgatggacggcaaggttttcaagggcaatgtcgggcatcaggagcttgcggcgtgggttgatggacttggactttga

SEQ ID NO: 2679 - DNA, 870 bp, Unknown
  Unknown gut bacteria
ttgggcagcattttagaaaagatcgaacaggctctcaaggatatgctgatcggatggatcgagagcaacctgaccaatatgttcaccgatgtcaacgagaaggtaggaacgattgccgccgaggtcggtcaaactccgtccggctggaacggcggcgtgtaccagatgatccggggactatccgaaaacgtgatagtccccatcgctggtatcatcatcaccttcgttttgtgctacgagctgatttccatgatcaccgagaaaaacaaccttcatgacatggacacttggatgttcttcaagtggtttttcaaggcggctgtggcgatctacctcgtgacgcacacctttgacatcgtgatggcagtattcgacatcgggcagaatgtagtttccggtgcagccggtgtcattcacggcaacacgagcattgacattgacgcgacgattgcgcagatgcgtaccggcatggagaacatgggcgtcggagaactgctcggactgtcgatagaaactcttctgatcagcttgtgcctcaaaatcatggcgatcctcattacggttatcctctacgggcgcatgattgagatttactgcactgtgagcattgcgcctattcccattgcaaccatgagcaaccgcgaatggggcagcatcggcacgaactatctaaagggtctgttcgctctggcatttcagggctttctcatcatggtctgcgtcggcatctatgcggtgctgatcaacggcatgatcatcgcagacaacattcattcggctctgttctctgtggcagcgtacacggttattctgtgcttctcgctgttcaagaccggaagcctcgcaaaatccattttccatgcgcactaa

SEQ ID NO: 2680 - DNA, 978 bp, Unknown
  Unknown gut bacteria
gcacaggaggatgatttcaacgacatccgctccgagtattccggtatgctgcaaagccagctcaccaagggcaacaacggactggtcaagaggaagtacatcaccttcggcattgaggcagactccctccgcacggcaaagccgaagctcgaacgcattgaaaccgacatcctcaacaacttcaaaactctcggcgtgaaaaccgagccgctgtccggctacgaacggctgaaagtgcttcatgatgtgttcaatatggacagcaatgagccgttccgcttttccttcgatatggttgcccggacggggctttccagcaaggacttcattgctcccacttcctttgacttccgtgaaggcaagtgcttcaagatgggcaaaaccatcggcgcggtgagcttcctgcaaatcctcgcgccggaactcaatgaccgtatgcttgccgacttccttgagatggacagcaacattacggtcaattttcatatccggacgattgaccaggcgaaggcaatcaagagcatcaagatgaagatcaccgacctcgacaagatgaagatcgaggagcagaaaaaagccgtccgctccggctacgacatggacatcatcccgtccgatctcgctaccttcggcggcgaggcgaagcgtctgttgcaggatctccagacccgcaatgagagactgttcctcgtgaccatcctcatcatgaacacagcaaccaaccgccagaagctcgaaaacgcggtgttccagaccgccgccattgcccaaaagtataactgtgcgctcaagcgtcttgacttccagcaggaagaggggctgatgtcctctctgcctatcggcgtcaatcaggtggagatcgaacgcggactgaccacttccagcacagcggtttttgtgccgttcaccacgcaggagctttttcagggcggcgaagctctctactacgggctgaacgcgctgtccaacaacatgatc

SEQ ID NO: 2681 - DNA, 576 bp, Unknown
  Unknown gut bacteria
atgtcacgcattattgagtttagaaagtctgctcaaaaagctgaaaggcaatccgctcaaggtaagacttgtgcgtttaccggtcatagaccgcagagtcttccgttcggctttgatgaatccgatgagcgttgtacttctttgaaatctgttatgcgggatcagattgtagcactcatcgagaacgagggcgtcacgcattttattaccggcatggctcttggcgtcgatatgtacgctgcggaaattgtactcgatttgaaatcaaaataccctcacattactctggaaagtgcaatcccttgtgagacacaagcgatcaaatggtctgtggcttcacgggaacggtattataatatcgcggcaaagtgtgacaaggagaccatgctgcaacgggagtacacgtcggactgcatggacaagagaaatcggtacatggtcgatcacgccgattatattctcgcagtatggaatggatgccccagcggtaccgggaacaccgtgagatatgcccacaaaaagggcaaatctatcatcgttatcaatccggtttcccttgatgtcacgcgggaataa

SEQ ID NO: 2682 - DNA, 1023 bp, Unknown
  Unknown gut bacteria
atgccaaacggcttgacagaggacggaacgaaagatgctgcggacatctattacgcaagtctctcttactacccctatcaaatgtacatcaactgggtaccgatggacgagggtaatgtcctctataatgacaagaagtttgctaccctgctttatcaatggcattgcgacgccttcacggaatacagtaaagtctccgatgcaggggcttttgtaaaaaacaatatctacgacttcattgatgacagcgagaagaccgtattggtggtggactgcgaaaactctgacccgtacaagctgtgcgccacgctcaaaaaccttgattatgaggtcatgcagaaaattacggcgatcattctctttgatgacgtacataccgctacggcatggcggattcttgaaaactacacccgcatccccgttgagcatatcatgattgagcggatcaagcagaacaaatcactggtagacatcaagctcaccgcaagagcctgtcaggaacactaccagaagcaagtggattccttcgtcatcgtctcaagcgattccgactactgggggcttatctcttccttgccggacgccagattccttgtcatgattgagcgggaaaaatgcggaccggatatgaaggcagcacttgcagaatccgggatattctactgctatctggatgacttctactccggcaacagcgaggacatcaagaaaaacgcactgttcaaggagatgtaccgctggattgacaactccgttcacctgaacgtcaacgatatgtttgacgctgctctgcgaaacacgaggatcgaaatgtctcccgcagagcggcggcagttctatgagaagcacatcagacacatgacgctgactatcgacgagaacggaaacgtcagcattgcgctgaaacgcggatggccttggtttctattccgggaggaatgtggatggacaacagattctattttggattcaatacatcggaggaacggaaaaagcgcagaaaagcagagctgtactccatga

SEQ ID NO: 2683 - DNA, 480 bp, Unknown
  Unknown gut bacteria
atgagcaagaaacttgtagcgtatttttctgcgtccggcgtgaccgcgaaggttgccgagacgctggcagaggcaatcggcgcggacatctttgagattgagccgaaggtgccttacacggaagctgatctgaactggatggacaagaaagcccgcagcacgattgagatgaacgatcctgcctcccgtcctgagattgccgtcaagcgggacaacatgaaggactatgataccatctttgtgggcttcccgatctggtggtacgtcgcgccgacgattatcaatacgtttcttgagagctatgatctgaccggcaagacgatcatcccgtttgcaacctccggaggaagcggcattggcaagacgaacgaacgccttgcgccgagctgcaaaggtgcaaaactgctggaaggcaaggtcttcaagagcagcgtcgggcataaagaactggcagcgtgggttgatggactgaaactttga

SEQ ID NO: 2684 - DNA, 594 bp, Unknown
  Unknown gut bacteria
atgcgcactaaggaggtcggcagcatgaagaagtacagcatcatctacgccgatcccccttgggcgtatcggacttactccaagaagggacagggacggtcggcggaaagccactacccgacaatgtgcattgaagacatcaaggcacttccggtcggtgagcttgccgctaaggactgcgctctgtttctctggatcacgttcccgtgcctctgtgaagcactcgaagtgctgacggcatggggcttttcttataagaccgtggcttttgtatgggtgaagcaaaaccgaaggaacgacgatctctttaccggcatgggctactggacaagggcgaatgccgaaatctgcatccttgcaacaaagggacatccgaagcgagttgacgccggtgtgcgtcaggtcatcctcagccacatcgaagagcattccaaaaagccggatgaggcgcgggaacgcattgttcggctcatgggagaccttccccgcgtggagctttttgcccgtcagtctcccgaaggctgggacgtttggggcaacgaggtcgaatgcacggctcatcttcctatggaggaaacaccatgctgcggctaa

SEQ ID NO: 2685 - DNA, 612 bp, Unknown
  Unknown gut bacteria
atgatgtacaatgaaaatctgcacgaagaagaacaacatctgatccagcagattgccgagcaaacagagagaggaaaaatcgactgggaactgacggagtataatccgctgtccattctgaatgaggacaagatagacaaaaacccagcagtaatctgtcagtccttctcctttgaagcgatcatcggcggatctcgttacgagcttgatgtcatggagaatattgatgtgccgtccggtatgggagactacaccataaccttgacacgggatgaaaccgaaaattatcttaaaattgaggatgcgctttcctttgactgtgaccgctatgaatgcacaccggaggaagtcgcagagcgatttgcggacagccccattgtccgtctctgcaacgccatcattcctgccacgcttgggcaggaggatttagaagaggtcttcacatgggcaaggtttttcaacgagactggcatttctgcaaagctgatgaatcatccgctgaccaagctctgtgaaaagctgttcgacgaacaccgtctgatggacttccatcgctgcgtcttggatgtggactatcgaaagctgctcctaaatgaactggctcataactaa

SEQ ID NO: 2686 - DNA, 1974 bp, Unknown
  Unknown gut bacteria
atgagtgagcaagtcagcaccttcttttgggatgaagccccgcagcatggcttggaaatgcgtgaagggcagcaggatatgtcctttgagattgtggacgccctcataaacgatcagcattttgcgattgaagctggcgtgggcattggaaagtcctttggctatcttgtgccggtgctgctgtacagcaaacgcatgaacaagccggttatcatcgcaacctcgaccattgcgcttcaagaacagctctggcgcgatgtccacgcggtaatgccccttcttgggctgaacagagatgttatcctcgcaaaaggacagacccattatctctgcaacaaacgcgcagatgagtatatgtgtgacccgaaagcagacccaccggacgcgatcaaagaaggaatcaagcaagggtatgaggaacgcaaggatttcccggaggttttgccgcaaggagtctgggacaaggtaaacgtgcagcggttaagcatgaagaattgcggctcctgtgaaaagaagtgcaaatattacaaagtccgcgcagcattaaagtttacggatggagtggtactgtgcaatcaggattttctaacccagcatctcatgaaactccggcgcggtcaggaagggctgattaacgccgccgctgatctgcttgtcgtggatgaagcacacaacttggatgataaggtgcggagtgccacaacggagcgtttcgggcaaggtatgctctttggaatgattaagagcgcattctatgagctgcgatcctttgaccagagcagtgtgtcaggtgaaaagcgagaggcagagagcgcaatcatcgccttctataactgcctgaaagcacaagtccaaaagcagatcaacgaggcagaacaggatatgcgctacgctgaccgctttttcttcgacaacaatggcagtgcgattgaactgcttaccgagatgaacgccgccatacacaacctttcgtccagcattcagatttattccagcatggatttcagaaacaaccgttcctttgctgcctctgatgatctggatgccgtcagcgagtccctttcagagcttcttgaccagatagacgatatgctgatctggattgagcagcacggcagcaacacggaactcgtctattgccctaaaaacacaaaagaaattgtgagccgcctatacttcaatggtgatgaaagaaccatcttgacctctgccacgctgacgaacgccacgagcgggtctctggaagaacagtattcttactttatcagcaataccggctttcccgctggtgatcgcggctgcttatccgagccaaagccttccccatatccatacgatgaacacgccatgatctactattgcgacgatctcccgcacccgaccagagaacatgaagccttcattgaaaagggcgtggagcgactgcttgagatcctgagcatttccaatggaaaggcactcgtgctgtttacggcaaagaccgacatggaagaggtctactccattctcagtgagaaaaatcttccgtacaaaatcttgatgcagcagccgggatcgtcgcaggacaaggtgctgaatgagtttaaggaagatacgaactccgtgcttctggggacgggtgcatattgggaaggtatcagcattgaaggaaaaagcctttccaatgtcatcattttccggcttccgttccctgtccccgatccgattatcgagtataagtgttccgttgctaaggacgctctgatggatgttcgcgttcccgaaatgattatcaagctcaagcaaggcatcgggcgattgatccgcaatttcacagacaccggcattgtctgcatcatcgaccgaagactgcgggatgagccgccggaacgctatcatgacattacatgggactccctgcctatcaaaaatcggacaagcagtttgggcgaacttaggaagttttacgaaggtctgccctcagccaaggaatga

SEQ ID NO: 2687 - DNA, 606 bp, Unknown
  Unknown gut bacteria
ctggactttgcactcaagaaggacgtttctgttgagccgcccagctatcttgtcttcttcaagggacgggacgttgatgtaatgaccgccgccttcaaggagttctccgccaagaccgtcaagcagaaggaacaggccgtccatccggcacaagctggatcaggagaaagcccagagcaatgcgcagcacaaggagaaggtcaaggtcaagaccaaggatcggggtgtggagctgtgaacaaacccgatgtgaagaagctcattcttctgaaccttccgtatgtcttcgccttctactttgcggataagattgccgccgtgttccgacttgcacccggcacggcgttcatcgacaagctgacaaacggctttgccgtgttcggcactgccttcgcaaatccgctgcccagctttcatcccgttgatctgctcatcggtgtgcttgccggtgcgctgctcaagttggcggtctacgtcaaaggcaagaatcgcaagaagttacggcagggcgaagaatacggatctgcccgctggggcaagccggaggacatcaagccgtacatggacccggagttctccaacaacgtcattctgacgcagacggag

SEQ ID NO: 2688 - DNA, 825 bp, Unknown
  Unknown gut bacteria
atggaatacaacgactataaagaagcccttttctatgccgcttccatctttaacgaacgcttgggggcagagttcagcgaggacaatcttgtactgcgctgctttcagacggaaaaccagcaggaagtctttgagcagttctgcaagcagtatttccctgaccggctggaagaccgatatacagaggacggctattttgactttcacgcctctgcattcgtcggcacaggagacggcgcggacggaatccttctgcgcacagacatagcgcgtcatccggcagagttgaagcacattcttctgcatgagctggcgcatatcttctgcacccgcaacgagattggcggagataatttctttgagcgatactgcatggacgataccatcagccgcgaagaggacggaaccattaacgccggttatgcggtctggcgggaactgattgcggagctgattgcatttgagctggatgacaactgcgatgtagttccgcttcgacgcaagaaagacctactcagctattacgaaggagaactcctgaccggcaacggaaaaatgggcgtcagcatgattctctgtgaggcaatgaccagtgctgagggcgaagcgtctatgacatgggacgctgccaaaagcaagtttacgcggttcaagccctttgatgatccactgtacagggacttgatggaactggtttttacacacgttagagaatactttatcgtgatcgaccgcgactttatctatgaaattggagttttgtatctgagcattgccgcacaagcgatgattgtgtccctaaagaacagatttcaggaagaatag

SEQ ID NO: 2689 - DNA, 621 bp, Unknown
  Unknown gut bacteria
cgcaagctctgccgcgagaccggctgtgatgtgtggtttccgttttacccgctctgcatggaacactgcattactgaaacctacgcgatggtgtacgaatgttatcgaaaaatgattatgctgtacggcggcggaaatgtcagtacctgcggcttttcctccggcggtgcgctggcgcttggcattgcggcgcataacaacgcccagccagagccactgccgcaaccgaggcacattgtcgccgtatcccccggcgaggtgccgtggaacgatgcggaaagggcgcggatgcaggcactcaataaaagggatgtttccattgattatacctttatggaaacggtggagaagttcatgcgccatggccaaagcaatgtgccggactatatgctctccggctcccgggggaattttaccggcgttggcgatattcacttcttctattctgccgacgaggtgctctacggtgctttgccggactttgaggaagcctgcaaacgggcaaatgtcccctatacggtgtccgcccgcccgaagatggtgcattgctactgtatgctgccgatctttcaggaagcgaaggaggacttcgcaaagatcgtggattttttgaagagatga

SEQ ID NO: 2690 - DNA, 1425 bp, Unknown
  Unknown gut bacteria
atctatgcccgtctttccgttgaaaacagcggcaagtctgaaaaggtggatgtcatcgcaaatcagattgagatttgcaagtcctacattgcagagcgtccctacctgaatctgatagatacctatgttgacaacgggcgaacgggtacggtttttgatagaccggagttcaaccgtctgatgaacgacatccgcaccggcaggatcaagtgccttgtggttcgtgatctcagccggttcgggcgtgactacatcgaggcaggaacctatctggaacgggtctttccgcagatcgggcttcggtttatcgctatcaaagagaactacgacaactttgatacggacggctccggcgaaagcctcattatccctctgcaaaacatgatcaacaccctctactcgaaggacatctcccgcaaggtttctaccgcgctcaaggcacagatggaaaacggagagttcaagaagcgcaatctcccgtatgggtatcgctgggatgaagaacacagcaatatggtcttcgaggaggaaaccgcaccgattgtccggaagattttccaatggaagattgaagggctgtcccttcctgcgattgcagaccggcttgatgcaatgaacgcgcccaatccggagtttcagaagtatcaggtcggcgtccgcacaggcaatgctacggcaaagaagatttggaacaaatcttcactcactaccattctggataatccccattacgtcggagataccgttctcggacggacgctgaacgccatctacaagggcgtcaagaatcagcacattgaccgtgaggaatggattgtttttcccaatactcacgaggcgattatctcccgtgaggacttccaaaaggtacaagagctgcgcgacgctgctgcaaggacaaggattgagaagatggagcgcacggagaaaatccgtgctacactgatcaatctctttgaagacaaaatcatctgtgcagattgcggcaggaaactctatttccatcgaaagcgcgttgacaagcgtaaggacggcgcatggtacgccttctatgagtgcagttcatccgtcaagcgcggcaacctctgtacgccgcactatacgcggcaggataagctcgaagccgatgtgcttgcggcgatccagcttcaagtcaaggcggctctcaattacgacaagctgcttgccaaactgagaaacagtgaaggcgaacgcagcatccgcgatcagcagaatgcgctcatcacaagcctgaatctgaaactcagcggcatctccaagaagcgtactcggctctatgaggacttcacagaaggcattctcgatgaagaggaatacgtctttgccaagaaagcctacgatgagcagtatgctaacctttcccggcggttggatatagagggttggcgggggggaggggtttgg

SEQ ID NO: 2691 - DNA, 108 bp, Unknown
  Unknown gut bacteria
gtctacgaggacacgagaggtcatgtagaatccaagtgcaagaaatgcgggcggatcacagtctttgatgtgctgaatatgagaagactgcgaccgcgtaccaagtaa

SEQ ID NO: 2692 - DNA, 447 bp, Unknown
  Unknown gut bacteria
acaggagtgattaccaaaatgacgtttggagagaaattcaaggctgaacgggagaagcggaagctgacccagcaggaagtagccgatgcactggggatcaacaggcgtatgattacccggtacgagaacggcatttcctttccccgtaccaaggacgcttacagaaaaatcgcggaatacttcaaggtggatgtgaactatctgctgaccgaggacgaagagtttgtggttcaggcatccgagcagtacggctcccgtggcatgaaacaggcaaaggatctgattgaaggaatgtccggcttgtttgcgggcggtacgctgtctgagcaggacaaggatgcggtgatgaaggcgttgcaggatatatattgggaatccaaagcccggaatgttgagaaatacacgccgaagaaatacaagaagaccggtacggacgcagaggaataa

SEQ ID NO: 2693 - DNA, 780 bp, Unknown
  Unknown gut bacteria
atgcgtaagaagtttcgttttctgaccgtccttgcggtctgcgtcatggttctgtcctgcttctcggtgacggcgtttgcctacgccgatgataccgagcagaaccttccggttacggaggcaacccagccggaacagcagcccgcagtcactcccacgccggaaaagtcgaagggtgagccgattgacgatgagggcaacgcctacacccgcgacttgctctatgacaaggcaaccaacaagcagttcatcactgtccagacgaaaagcggcaacacgttctatatcgtcatcgactacgatgcgcccatcaacgaggatgaggaacagtatcagacgtacttcctcaacatggtcgatgaaagcgatctgcttgcgctgctggatgatgacactgcggctgctctgaccacctgtaactgcaaggaaaaatgcgctgccggtcaagtcaataccgactgcccgggctgcaagaccaacatgagcgaatgcaccggcacagcccccgttacacctgagccggatgaggatgcggaaaccgatgtcccagcccccaaacccgaaaagaaatccaacatcggcatgatcctcgtcatcttcgttcttgccggtgctgcgggtgcagcttattactacatcaagttcgtcaagggcagaaagcccaaggatgaggacatggacttctttgatgatgaaggctacgaggaagagccgtacatcaacgaggatgatgagccgcagattgcggaggatgctgaaacggatggtgatgaagattga

SEQ ID NO: 2694 - DNA, 1707 bp, Unknown
  Unknown gut bacteria
gtggcaagaaaaagcagaaagcaaattgcagtcgaagatccggttatcgaatctgcctcttccgaggtcttcgcaacagccatctatgcccgtctttccgttgaaaacagcggcaagtctgaaaaggtggatgtcatcgcaaatcagatagagatttgcaagtcctacattgcagagcgtccctacctgaatctgatagatacctatgtggacaacggacgaacgggtacggtttttgatagaccggagttcaaccgtctgatgaacgacatccgcaccggcaggatcaagtgccttgtggttcgtgatctcagccggttcgggcgagactacatcgaggcaggaacctatctggaacgggtctttccgcagatcgggcttcggtttatcgccatcaaggaaaactacgacaactttgatacggacagctccggcgaaagcctcatcatccctctgcaaaacatgatcaacaccctctactcgaaggacatctcccgcaaggtttctactgcgctcaaggcgcagatggaaagcggagagttcaagaagcgcaatctcccgtatggctaccgctgggatgaagaacactgcaatatggttttcgatgaggaaaccgcgccgattgtccagaagattttccaatggaagattgaagggctgtcccttccggcgattgcagaccggcttgatgccatgaacgcgcccaatccggagtttcagaagtatcaggtcggcgtccgcacaggcaatgctacggcaaagaagatttggaacaaatcttcactcactaccattctggataatccccattacgtcggagataccgttctcggacggacgctgaacgccatctataagggtgtcaagaatcagcatatcgaccgcgaggaatggattgtttttcccaatactcacgaggcgattatctcccgtgaggacttccagaaggtacgagaaatgcggaacgctgctgcaaggacaagggttgagaagatggagcgcacggaggaaattcgcgctacactggtcaatctctttgaagacagaatcgtctgcgcagactgtggcaggaagctctatttccatcgcaagcgcgttgacaagcgcaaggacggcgcatggtacgccttctatgagtgcagctcatccgtcaagcgcggcaatctctgtacgccacactatacgcggcaggacacactcgaagccgatgtgcttgcggcgatccagcttcaagtcaaggcagctctcaattacgacaagctgcttgccaagctgagaaacagcgaaggtgaacgcagcatccgcgatcaacaaaatgcgctcattacgagcctgaatctgaaactcagcggcgtctccaagaaacgcacccggctctacgaggacttcacggaaggcattctcgatgaagaggaatacgcctttgccaaaaaagcctacgatgagcagtatgccgacctttcccggcggctggatgaagcagttcagcggaaggtcaagtttgccgaagcaatgtccgaggacaataagtggctcacactgatgaaatccgtcagcggtgcagaaaagctctctcaggagttagttgacgagtccgtagagcttgtgaaagtccatgagggcggttcaatcgagctggtcatgaaatacggcgatatttacgctctgaccgttcagagtatcaaggaagtacaggaggcgatgtaa

SEQ ID NO: 2695 - DNA, 246 bp, Unknown
  Unknown gut bacteria
atgcggtatgataaagtcacgataaagaaagaggtggcgaacatgaaaatcaagctcaatcccgatcaggagattgttaataccatccgggaaggactcaagcgcaccggcggatactgtccctgccgcagggagcgcacagaggcgaccaaatgtatgtgccaggagtttaaggatcaaattgcagatccgggcttcgagggattctgccactgtatgctctattacaaatccttgcaggattaa

SEQ ID NO: 2696 - DNA, 309 bp, Unknown
  Unknown gut bacteria
atgatgaagtacaaactgttccgttcccccggtgatctggacaaggcagtccggaagcacgaactggttgccgtggagaccggcaaaagcattgatgatgtggcagatgcgcttatccgtgccgttcgggatgatattgcggaaatgccggagtatacgcactgcgaaaccgctgcgtatgcaccggaaccaattcaggagcatcgccgcgtaagacgttatcagtatgagatgatgggtgttgtttacccgcagtatgcggagaagaacatcctgattgattatggcgtgattgaagaggcggagtaa

SEQ ID NO: 2697 - DNA, 162 bp, Unknown
  Unknown gut bacteria
ttgaacaacagcacagcaaaggcaaagcctaagatgacggtcaaaaacggcgtcatttacggcgatgccctttccgctcaggaaaagaagcggatcgtcatgcagaagaaaaaggacaggaaggcaaagaaagtccgcaagtccgcccagcagaccatcccc

SEQ ID NO: 2698 - DNA, 843 bp, Unknown
  Unknown gut bacteria
atgtggatggacaacagattctattttggattcaatacatcggaggaacggaaaaagcgcagaaaagcagagctgtactccatgagtgagcaagtcagcaccttcttttgggatgaagccccgcagcatggcttggaaatgcgtgaagggcagcaggatatgtcctttgagattgtggacgccctcataaacgatcagcactttgcgattgaagctggcgtgggcattggaaagtcctttggctatcttgtgccggtgctgctgtacagcaaacgcatgaacaagccggttatcatcgcaacctcgaccattgcgcttcaagaacagctctggcgcgatgtccacacggtaatgccccttcttgggctgaacagagatgttatcctcgcaaaaggacaggcccattatctctgcaacaaacgcgcagatgaatatatgtgcgatccgaaagcagacccgccggacgcacttaaagaaggaatcaagcaagggtatgaggaacacaaggatttcccggaggttttgccgcaaggcatctgggacaaggtaaacgtgcagcggttgagcatgaagaattgtggctcctgtgaaaagaagtgcaagtattacaaagtccgcgcagcattaaagtttacggatggagtggtactgtgcaatcaggattttctaacccagcatctcatgaaactccggcgcggtcaagacgggctgattaacgccgccgctgatctgcttgtcgtggatgaagcgcacaacttggatgataaagtgcgtagtgccacaacggaacgtttcggacagggtatgctctttgggatgatcaagagtgcattctatgagctg

SEQ ID NO: 2699 - DNA, 483 bp, Unknown
  Unknown gut bacteria
atgaaaatccctaagacccctatcgcgttcgattacgacctctggactacggaggacggcaagtgcatggtgcgcgtgaaacgaaccggcgaagtttccgaggttgaccgcaaggttatgagaatccttcgcgcagaggaaaagcggatcagacgctcgtatggctctgacaacacctctgaggatgaggacggcgcagagaaaatttctgataccgtgctgtcccttgacgctatgccggaggacgatgtgaagtccgctgcatggctggcagactcccgcgactgcatggaggaactgatcaccgccctcaaagagaaggagcttctttccattctgaccgagaagcagcgcgaattgtatcttgcgatgacccgtgaaggactgactcttcgagagtttgcccggaggaaaggcattggcatcagagctgcatttgacctcaaagcagcggtgcagaaaaaatttcaaaaaattttttga

SEQ ID NO: 2700 - DNA, 303 bp, Unknown
  Unknown gut bacteria
cttcctactggcagcagcatttctacgccttcggaagacccgcctattaaaagaaaggagttttgcatgaatcccaagtatcagaaagtcctctccgacattgagaaggctgaaaagaagaagtctgaaatcgaaggtaagctcaaggagctgtatgacaagaagacggggctggaaaaccttgaaatcatcaataccgcgcgctctatggtgatggacaaggatcagatcatggcgttcctgtcttccatgaaaggcggcaccaagcccgctgaaaatacggaggtaatcgacaatgcgtaa

SEQ ID NO: 2701 - DNA, 711 bp, Unknown
  Unknown gut bacteria
atgggtatcttagacagcattgttgagtggattgccacgcagatcatgaacctgctggacctggtcacaggatccgttcttggagcgctgggttgtgacatgagcactttcttgcgttactttccagccgctgagacgctctacgaagtctttgtagcgattgctgttggctttatccttttgaacctcgtgtggcagctcttcaaaaacttcgggcttggtgtgggccttagtgcggaggaccctaccaagctcgctatcaagtctatcctcttcgtttttctggcactgtttgccgatcagatcatggtgctcatcctgggaatcgccggcacaccatatgactgggttgtcgatacagcactacctcccattgagttttccaacttcggtagcgtgctcacggtgatagtcggatgcctcgcctccggatccgtgagccttattgttttgatccttgtgatcatcattgcctggaactatatcaagctcctgtttgaggcagcggaacgatatatccttgttggagttctgatctatacggcgcccattgcgtttgcgacaggtgcgtcagaaagcacatctaatgtattcagcgcgtggtgccgaatgcttggtggtcagcttttccttttgatcatgaatgcatggtgcctgcgcctgttcacaagcatggttggcaacttccttgccaatccgctgtccatatga

SEQ ID NO: 2702 - DNA, 2943 bp, Unknown
  Unknown gut bacteria
atgagcaaaccgaatgaagatcgggatgtctactatatcccaccaaactttctcacaagtgggcgcttatttggcggcatgattcgagcacgcaatgcgattgaagcttgcgtgctcgtcttattaacaggtgtccccattatcaagttgcccttttcccttactacacggatcatcattttgtgcctggtgtctctgccacttggaatctttggtgtgattggatttgaaggtgattcgctttctgagttcgctgttaactgggtgcgttggctcatccatcgcaggacactataccgatcagacactccggttccagaggcacctgaaaaaccaatgaaggctgtgtcgggaatgtcggcacctaagccgcccgagcagttagggatcaagatcaaggagaaacccaagaagcggaaaaagcgcaaacctgtgaagaaaccccataaagcaagcaagcacaaatcatcagttgcaaagaaaaagcagcctctccacgcagaggacttcatcccggtcagagatatccgaaacggcattatcgagactacagatggtcgctatctccgtgtgatcgaggtggagccgatcaacttcttgctccgtaacatttccgagcagaagaacatcgtcgccagcttcgcaagttggatgaagatttctcctgtaaaggtccaaatcaaagtgctgacaaaaaaggccgatatcggcaagcacctcaataccattgagcgtgaaatggaggcagaggataatcccaagtgccgggatctccaactggactactaccatctaatccagacgatcggttcccgtgaggccatcacacgacgcttcctcgtcatctttgagtatgaggcagtcaccaatcgtaagccggaatacgcagagattgtatctgcactggagaccgctgttcaaacagcgcgtcagtactttctgcactgtgacaatgccgttgtcgctcatgaggatgagaacatcttccttatggaagtcctctacaccattttcaatcgtgccacctgcgaagtgaagccggttgagaagcgggtccgtgaactgcaggcagtgcggaaggacaccgacatttcggttcctgtaccactcaaaagtgtgctggcacctgagtccattgacctgacccatgggtcctatgtcgtcatggatggtgtctatcatgcatatctgatcgtaccctctgacgggtataacccccgagtggtcgccggttggacgagcattctcgtcaatgcgggcgaaggcatcgatgtggactttttcttttcccgcgaaccaaaagagcgtatccaggctaagctgggtcagcagatccgaattaaccgcagccgactcaaggatacatcggacacgaatacggacttcgatgatttcgaaagcgccattcgatccggatacttcctgaaggaaggtcttgcgaactacgaggacttctactactgcaacaccctggtcacggttactgcagatactctggaaaacctggagtggcgcatctctgaagtgcgtcgccttatgatctcacaggatatggacattcgtatctgccgcttcaggcaggaacaggcgcttctctcgatccttccgttctgtaagctggataagaagttgttcgaggccagcaagcgcaatatgctgacatcctctgcggccagttgctatcccttcacctcgtttgagatgagtgacgagaatggcatcttgctcggtgttaatcagcataacaacagcctggtcatcgtggatatcttcaatagccgggtttacaaaaacgccaatatggtacttcttggaacaagcggcgcaggtaagaccttcacgctccagctgatcgctttgcgcatgaggcgtaaaagcacgcaggtattcattatcgctcctctgaagggacatgagttcctgcgcgcatgcaacaatatcggaggtgagtttatctccataagccctgcctccaagcagtgcatcaatgtctgtgagatccgtaagcaagacttgagcgccaatcagctgatagatggcgttgtcaatgagaactccattctggcaaaaaagatccaacagctgcacatcttcttctctctgttgatccccgatatcaaccatgaagagcgtcagcttctggatgaggctctgattcgaacctatgcaaaaaaaggaatcactcacaacaacgagtcgctgatcgacccagaccacccggatcggtatcgcgagatgcccctgctgggagatgtctatgagatccttatggagtctccggaaacgaagcgcatgggcaacattctcaatcgtcttgtcaacggctctgcgaagaccttcaaccaacacaccaatgtccaacttgataacctctataccgtactggacatctctgagcttacaggcgagctgctccctgtgggcatgttcgttgctctggactatgtatgggataaggcaaaggaggatcgcaccaaggagaaagccatcttcattgatgaggcgtgggagctgatcggagacgacgataccagtaacccgaataatgcaaaggcgctggccggagaatgggtccaagaaatcttcaaaatcatccgtggctatggcggcgcagctgttgcagctacgcaggatatcggcgaccttgacaggagccgatttggcaaaggcatcctgaatgttgccaagacgaagatcattttgaatctggaggaggatgaagcccgaagagtgcagagcatcctccacctgtcggatgctgagatcatgtcgattacccgttttgagcgcggccagggcctaatctcaacaaactccaatcacatcactgtttccttcaaagcttcccctctggagaagcagttgatcactacagaccgcatggagctcaatcaaatcctccaggaaaagatggctcaaaatgcgcataatgctgacttatga

SEQ ID NO: 2703 - DNA, 1242 bp, Unknown
  Unknown gut bacteria
tgttttttgcttggtcagtttctgcgcaacttcggcaatgcatgccgcagcctcgggcagcctgtcggcagccttactgttttcaagattggagtgcctatgattacttgcaagaacgatcggttgcttgaactgctgtggtttgttgggtactgtattgagtttccgacgcagttggcggttcgcatcggtggtggtgctgagtggaatcgcagagtgatgtatcgggcgattcgagagggctatgtgaagctctaccgcaggaaacataagcggcatgtaatccggtctctgagcttaacgcagaagggatttgattatgtggcgcagagtgatcctgaggcagtggccatgatctattctcgaatcaattgttccgagcgcgtgtacccatcaaaagtcgataaaatcctgagacttcacgctatcgccgtgggcacggtcatggcccatgcggccgatgcagagattttgatctcacaaaagccatccctgatgtccccggcaaagcgcacctcaaacacaatcaccccagatccaacccagtgttactactatgcgtcccacgaactgcgagtcgccatcgaggagtactcaccggaatccgtttccaagagttcccgcacgattggtattgtggtcaaggggaagcattgttatttcctctacttcaccggcagcacacggatgtactggatgaagaatagcgaggagaactacgccgcagctgtgaagagcttacttctggccagaggctttggcgtcaccacgatccatcaggtcgtgatcggctctactatgagcgtggcgcagcgcctatgccacagtgcaaaaccatttggcaacaagtactttgtagtttccacattcttcgcccagtgcctcttcctaaccaacaaccccgatggtgattctctattgaaaatcatcctcaatccggacatggcgctggaactgaaccaggccatccttgcaccttaccatccaccacggactcccaaccgggagtatgacgccatcgatgtccaacacgacaaaccggtcatcctgaattatcaatgtgatctcctgaagctatcggatatccgtccgatcccagaagggttccgtggaagtcccattatgctctgcttcgattaccaggctcagacggttcagggaattgtcggaccggccatcgaagtgcgtccagtagaaagtatgagcaaccatggaaaaaagaaaactgaaaatagcccttag

SEQ ID NO: 2704 - DNA, 987 bp, Unknown
  Unknown gut bacteria
atgcctaagaagaaagtaactgaagctgttgaagaggtcattcaggaaccggttgtttctgaacctgcgccccctcaggcaccccggcgccaaggaagtgatgacctgcttgaactcaatgatctggagcgtggcgttacccgtgaggatagcgaagacgccaagtggggctatcttgccggcgcagcgcgcaggcagcagatcctgaccggcatcgtcagcagcggcatcattcagaccgagaatggtcttcctgtttgcccggttgattttgaaggcctccgcatcctgattcccattcgcgagatggtgttgacggaatggcctgaagaggatcccattcctcgatctgtcagaatccagattgggcgtatgctgggtgcgaccatagacttcatcccagcggccgtggatatccgcaatcgtgcggcagttggttcccgtaaggcggccatgctgcagcgtcagaagcggtactatgccaccggccgtgtaaagcccggtatcctgatggcgtgccgtgttctgggtgtcggcaacaacaccatgacggtggaggcttgcggtgtggatactgagatctatgcccgcaatgtctcctgggaatggttctctgacattgcggatctgcactccaccggcgatctggtcgttgctagggtcatggatgtttcttacaacgaggagcgggatgtctattcggtcaacctctccatcaaagaggcatctgagaatcccgatcgggcagccctggagaagatcactcccaactccaactatttcggtgtcgttaccggcgtgaaagaccgcgttttcttcgtccgccttcaggtgggcgtcaatgccaagactaagctctatcgttccatcgacatgcccagcagactggatacggtcagcttccgtgtcaccggagtcgatgaggaaaacggcatcgcgctgggcttcatcaccagaatcatcaaacgccatactagattgaggtaa

SEQ ID NO: 2705 - DNA, 1152 bp, Unknown
  Unknown gut bacteria
atgatggaaagcaaagtattcgcggacaacttcagtcgtagcttcagcgagtcgggggacttctttcagtttctcagcgctcggcaggcccgcagcaagtggatgacagctccgtccaaggaactccggtttgagccggtggaacggggatccacgctcggaaatctgtatatgcagatctacgaccacaacggcgacgcagatgttctggaggacacgatggagaataccagtctcctgttgaaggtggatggtaaggactacccggtccgttcctgtgctctcaagaccgttctggagcgtgcccgcatctccggtcatgccctcaacaaagtctccaaaagcgtattcgctgagattctcaactactgcatgggcgttgcctccggcgacagcctgatcaaagtcgcagatgagaaggtatcggcagtacacggtggagatcccaaggactacacggtcatggagatgctgcccctattcaaagcgaccaatgacttcctcaatcgagagtatcccggtaatcgcttcatgaccgcccacttcgatcactctatcgcaaccgctatctggcgcctggatggccaggcagacaaactccttgatacataccaccgggagattgccgccaaaggcctgcgtgccgacaaactggttcccgcactgcgtttctccacctccgatgtcggcatgagtggagcgaacctctatccgatcttcctggccggcgcagagtcccggattatcccactgggatatcccatccgcaccgagcacaagaacggatctggcatggagtacttcgaggagcagcttggtctggtctatgcgcagttcgagaaagcagtcgataagcaggttcagctcatgaacatcgagatccgctatcccgttactaccttaatgcgggtgctgaagcggatcaaggcgcccaagaaggcttcctatgaggcgatggactactttatggccattcacggtgatgcgccctgtacggcgtatgacctgttcatgcagatgagcgatgttatcttctctgcccagtgtgacggcgcatccggtatgcgcattgcacagcttgaggagatcgtatctcgggcgctgaatgtgaactggcacgagtatgatcaccctggcgacttcaagtggtga

SEQ ID NO: 2706 - DNA, 447 bp, Unknown
  Unknown gut bacteria
atgaaatactctcccagcagccgagatgctcttgacgctcactgcagggaggtcatccggtcctgcctcaacattgtggagcagcatggtgacacctatgtcgccatccacaaggacgacgagattgactgcgtcgtccttgtctccatgattcgaagctatcccatcatgtccatcattgtcgctgataagatcctgttcgcagacatcaatgccgatcagatgtatggcgttgcgaacgaactgaatctggactcggtcacaggttggcactccgtcttcctggcagatgacagcatgatctacatgtaccggcaatgcctctggctttcgatgaatctgacctacgaagacctccttgccatgctgaaagaatgcatcagcgaatacaagcgcggcaaaggccgccttactaccggtgatcatccgactaacccggtcgcatga

SEQ ID NO: 2707 - DNA, 663 bp, Unknown
  Unknown gut bacteria
atggaaaaccccaaatatatccttgttatgcgccaggtcgcttcagattatgacggcatcagccatgaactcttccagatagccaataatctggagcgcatggatcagttcaacccccagcagaagctgttcagcctggttcgtaacgctgaagtttccacggtctccctgcgaaatctcacggctcgaacggtccgtgatgataccgcacacttctacggtgaggtggctgatctgcttggaattcggatcgatgagacccatgactggctcaaaatcacagtgcctgcaatcctaccgaagcgaaaccagagggataatcaggcgtttctgacacgccctctgcgctatgcgctcctcgacttcctcaaggaaaatccgatggaacggttcggaagctgtgctatctgcattgtccataactacgatgaggcactcggtaagcggcgcattcgagactacgataacatcgaaaccaagagatatctggatgtgatcgagtctatgctactgaccaacgacagcgggctgttgtgtacggtgcttcaggccacaaaggtgtctgatcgagactgcacagagttctatctgatgcgacccgagaccctctctacatgggctaaaaaccacataaaatcaactaccaattcctgctttgaatga

SEQ ID NO: 2708 - DNA, 987 bp, Unknown
  Unknown gut bacteria
atgcctgcccgagaggacatggctcctcagcattccgatgatgttatctatcgggttgctccgtactgccgagtcagtacgatgtccgaaatgcaggcagagagttttgaaatccagcaacagtactacaacgagtacattgccaagcacccgaattggacgctggttcgcatctatgccgatgaaggcatctcagcaacttcggtgaagaaccgcaaggacttcaacaacatgattgaggactgtaaggctggcaagatcgacctcatcgtcacaaagtctgtcagccgttttgcccgtaatgtcgtggactgcatcaagtacgcccgtgacctgagagccctatcgccacccgtcggcatctactttgaaacagagaacatcaacacgctatcccaaaatggcgaactgctcctaaccgttttggccgcatttgcacaggacgagagcgtcaacaagtccatcagcgttgcctggggtatccgacagcgatttgctaagggcattcccaaactggtcaagccctacggatatcagaatgttgatggcaagcttgtcgtggatgaggaggaagccggtgtagttattcggatcttcgccttctatctcgggggtaaaaccccatatgagatcgcaaagatactgacgcacgaaggtatccccactcccaccggaaagaagccgtgctggacgatctcttccgtcacctacattctcggcaacgaccgatactgtggagatgtgattatgcaaaagagcctatgtgtagacctgttcgctcacaagcgcgttcgcaatctgggccaggtggaacggtaccggatgcgtgatgttcacccgcctctgatctccaaggaggagtggcgtgaggcaaagaaccggatctctatgcccgatcgcgaagctgttattctcgaagaaattactggagagggaattctctcctcactacatccgatactattcaaggaggacattgatgtatga

SEQ ID NO: 2709 - DNA, 570 bp, Unknown
  Unknown gut bacteria
atgaatgcctgcatgtctgaattccgcattgtcaacccgacccttcgcaccttcagcgccgctgaggcgcgcatcgcccactcgagcatccggttcaataatctgagtgccgctgagttgggctatccggagcatattcgtctgctgatcagctcggatggctgcacgctggccattcaggcctgtgatccgaaggacaagtgcgccgtgccctttatggccggtcgcactgccgatgatctgaaaggtcaaaaaaagtggacgactgtgagtaaccggatgctcacccacatcatccggagcaagctgggctgggaaaccgcgaagacgccgcgccggttctatggcgtaccctggcctgagcagggcgcgatcatctttgatctgaccaagattgcaccgcctcgtacccggaccccgaacctgtctgcggaagatatgctgcgtgcctatgaactggccgagtccggctctctgcttcctgttatggcccccgcatggtcccgacagccctttgcttccgtgcctcccagtgaagtcatcgaaactcagtatgtgcaagtgagctaa

SEQ ID NO: 2710 - DNA, 1224 bp, Unknown
  Unknown gut bacteria
atgaaacgaaaacgcatattcacaatccttgtgctcgtgctgctcacctgtgctctgtccacaactgcttttgccatcgatgagagtgaagtggaaagtgccattgcagcgtccagtcaagaagaagttgccggcaatatcttcatctggttcctgtgtgccattgggtttctcaaagtaagtcagaagatcgatagcttcatggcttccatgggagtcaatgttggcaggacaggaggaagcatgctggcagaactcatggtagccggccgtggtatcgccactgctgcaggtgcatttggaagcacggtttctaatcgtcactcctcgcacggtacacacaatggtggtcaggcaaccggcgcagcatttaccggtggcggaaacggcctcgtcggggtcaccaaacgagctgtgggtaatgctgcagcatcaagtgcaacaggcaccggatctggtcttagcagcatcattggtggtgctatgttcggctccagcttagcaagcgggggcaagttcgcaactagtgtgatcggagctgttgcaaagggagatatatcctctgtcggttcgatcaccggagaacaggcgtcggaagcattgaccagttatcttggctactcaagtgctgcgacgagtgagatacaaacggatgatccggtcacaattcccacggcgcctaccccaatgaacggcgaagatgttgtcaccctcgatggaggatcagcagccggtgttatcccacccgaaactcaaccgtgggcggcgcccagtgcccccaacccggtggtttcctctccggtgggagcaaaaccagtttctgaaggaagcgcattgaccggcgtgatcacaactgctacgcacacagcttcgaccacccccacggccccatctcccggcactgtccgcgagggggctggtgttcccagttcgcctcccacattccgcaatgtcgaaattggcggagggcgcatcacaggacacgaagttgctcctgatggtcagtctgaacgggagttcgctatgtatagcactgagcagtatatggctcctaccggcccctacgataccgtagagacgatagatggctcttcctggtacaggcaatatgcacagccgactgtcgagaagactccctataaggatggcgacgataagattcggtatgaggagcgcattgttcctcaaatgccgcccgtgcccaagagaaaggacaaagtctaa

SEQ ID NO: 2711 - DNA, 2199 bp, Unknown
  Unknown gut bacteria
ttggaggaaccgcgtatgagaacatcacatcgacagatccgaaagcggatccttgacgcaaaaagcaagatatcagatgaggagttcttctcctcaagagcctataacggctatctgaccgaccttgccgaggcggcaacgaaacgctataagcggccgctgcgcgtgcgtgttgtggcagaccatgacgatgataccgtggcctttacggattaccacggcatttatatcaatgcctgcaaccacatcacctggagcttaccgacccgactgctgcgctccatgagtctggagggcttcaatgcgcatgagtgtggacacaacctgttcaccgataaccgcatttggaacagctacttcagcaaactggagaagggcaaattctacccgaagatgcctgacggtctggacagtatgcaaaagctccatgcacgcgacatcctcgaagcagttctcgatgagaccgacacggttccttatcaggtcatcatgagtgtggcgcacgcgctgcagaacatcttggaagacggatatgtggatgccaggtactcctatgagtttcctggctcccccgccaaagggatcgcactcaataacctgcgcttcgcggataccgtgccggagatcagtgagatgatcaatcgcaagtattatgaccacagtatcgtactcaacctcctgatccagtatatccgggcacacgaggtcaataacctgtcaggctacaccggtgagttcattgacaaactctaccagtacattcctctggtcgatgagtgtgtttacgacgacgatgccagatcccgctgtgagaccgtgagcaagatcctgatagatctctggccaatgatgcagcgctgctttgacgctctgcgagataagcagaaacaggcgcaacagcaggctcagcagcagaaaggagtcggtagcggtagtggttccggaggcgttcctacccctggccagtctggtagcggggatgatgaagacgataatggattgcagcagggtaagcaggcggttgaggaagacctctccagccaactccctaaggcggcgcctaacttcacgatgaagacgacacctgtcccgagcaatggctccttcacgcccgatcctgggcagatgaatgccatccgggcacaggccgagcgtgtgatttcggaagagagtgaccgcattgctgcccatctgacgaatagtatcacaagcagcggcagtggcggtgtggatcagaacagcgagtatgacggctatgactacgagcacgcagcagaggacattgaacggcttttggagcatatggcggaggaaaaagtcacagaggaactagaggaagaactctctgaagaactccagcgtgaggcaaattccatccgatatggcaacgcgcaccgcaatatccacatcacggtcaaccgtatggctcgcgtggatcagaacctcattgacagctataaccgcgtggctcccgatcttttgatgctctcaaagcgcctgcagcgtagtgttagcacagcgcttcgtgatcagcggcagggcggcaagcagaccggtcttctgatcggcaagcgactgaatcagcacgccttgcaccggactgacggacgcatcttctacaactcccggcttccgactgagccgatcaacctttccgttggcctgctcatcgacgagagtggctctatgtgttcaaatgatcgcattaccagagcccgagcaactgccattgtgattcaggacttctgcgagtcgcttggtatcccgctgctggtcgttggtcataccgcctggagctcacatgttgaactgttttcctactcggatttcgatacctacgataagaataaccgctatcggctgatggacatgagtgccagagactgtaaccgcgacggcgccgcgttgcgctttgtggcggaaaaactctctaagcagacatctgaggtgaaaatcctcatgatcatctgcgatgggcagccaaatgatgacggttactccggatctgcagcagaagctgatctgcgtgggatcaaactggagtatgcgcgaaaaggtgtcaaaatctacgcggcagccattggtgaagaccgcccgcgaattgagcggatctatggtgatggctatttggacatcaccaatctccaagaactgccggtgatgctgacgaacctgatcgtgcgtagcctccctcgatga

SEQ ID NO: 2712 - DNA, 252 bp, Unknown
  Unknown gut bacteria
atgtacgatgctgcacttgctcccaccgtcatggacatggcaacgacgagaacaagcaccaaggaagtgattttttccttcatggatcttgatcctttctgttcgtgggtgtcatgcgaccgggttagtcggatgatcaccggtagtaaggcggcctttgccgcgcttgtattcgctgatgcattctttcagcatggcaaggaggtcttcgtaggtcagattcatcgaaagccagaggcattgccggtacat

SEQ ID NO: 2713 - DNA, 636 bp, Unknown
  Unknown gut bacteria
atgcccgcagagcaaaaggcctttcctgcgaagcaggagaccaaaccgcttacggagactctgcaagaagcagatgatgacacccgactgagcttgctcagacaggtcaattatcgaatcatggagcagctgaagcagagctatcccacggtcgcatggctctgggaggctcgtccgagctccgaggagatcagcaagggttgcaccaaacgcatcaagctctatcactgtgatccattcaacttcggtgaggtgacgctgagcgccactggaaagttggagatcgccctggtccagatggttcctcttgcggaggctgaattgcagccgcacaacgatgaggacctggaagagcaggacatcctggatcgcagcgatgtgaagcagtggtacacgcagaaaggcatcgcattgctcagcgctttgattgacgagctgaatgtgcaaggccacaagcgcctgaccatcaaggagaacggagatgtcttcgtcacagccagtggtaagcagcagccggtggataccatccccgactttccgccccgtcctgcgtgggaggatctgtgtgttctggcacgcgaagatgacattgccgctgaagtgtgtaaccaggaactcaccgtgtcctgggcctaa

SEQ ID NO: 2714 - DNA, 531 bp, Unknown
  Unknown gut bacteria
atgaagtttgcatatgctgcccgagatcgagaagtggcctttatcattcggctgctgaccatcttcggggtcgttgaacagcgacaaatgcggttgctcttcaatcatttgagcaatcgttcctatggccagatcctcgcacgactccggcgagagggtctggcctacttttcgccggacggccaattccttgccacaagtaggtactcgctggaccacggaaagacccttgaatctgtcatggtattctgggcattcatcaaaatgcgagacaatgtgctggacttctgcgcaagcgaccctccggctattttatcgttctcttctgcggccaaggattatgacctgatccctggtagtaagcagaatatccctgcaatcaacgcagctcgcaccgtggttgcggaagcgacagtccgcctgatcgttgttgatgatctgagcactctggatgaggtagagcccagactggtcaacgattatggcatcttagtcggcccgaatggtgttgagcaaatctataagatgtga

SEQ ID NO: 2715 - DNA, 936 bp, Unknown
  Unknown gut bacteria
atggacagagaagaagcagcaaaagagttgatggccatgctcgaagaagcacaagagggcccatactattctgaggaagaagtgcgagcccatctgctggaaatcctggcccctcgcaaccaagtatatatgactggcgacacccatgggcaatttgagcgcgtgatcgagttctgcgcacgcagagaggttgaaccggaaaacacctttgtgatcttgggcgacgcagggctgaactactacaatgaccgcagggaccgaaagaagaaagaccaacttgcccaggtacccatcacattcttctgcctacacggcaatcacgagatgcgcccgtccgaagagctcggttatgaggtcgctgaatatcacggtggcaaggtttggatgcagccggcttatcctaatatcctgttcgccattgacggcgaggtctatgacttcaatggcaattcctgcattgtcatcggcggcgcctacagcgtggataaatactatcgtctggcccgtggttggagctggttcccagatgaacagccttccgaagaaatcaaagccaaggtggagcgcgtcctcgccgagcgcaactggaagattgatattgtgttgtctcataccggcccgctgaagtatgagccgaccgaagtctttctgcccatgatcgatcagagtaccgtggacaagtctaccgaagtatggctggagcagatcgaggcgaagctcgattatgagcgctggtattttgcccactaccacaccgagaaagaagtgggcaagattcggatcatgcataatgactacactatgatccctcacgaagcctccgttgcggcagaaaaggacatgattcgccgcatgcatcgtcaggcggagattgcagaagcgctgggacttctggacgatgcaccaaaccaaaagaatggagatgatatctcatga

SEQ ID NO: 2716 - DNA, 381 bp, Unknown
  Unknown gut bacteria
atgatgtcgaagacaaggagaaagcagacgaagagaaaagtagattttgactggtattgcaagaccaagaaggatgtcatcaacaatgctgcctatgagctcatcgttgctctaacggccaagtcagcgccaccgaggaagtttgagttatccattccccagtgggatgacttgatgatcgccaacatcgtggagaatgctatcaatgccattgatgagcggatcggctactactgccacccgttctatcatgaggtagacaagctcccgtgctatttgggcgatcgttgtgataacccccattgcatcttcaaaagcgatcctgattatcggaaggcgccgtcttctgtgatggatatggatattgaagagagggggtga

SEQ ID NO: 2717 - DNA, 1929 bp, Unknown
  Unknown gut bacteria
atggaaagaagaaaactgaaaataacccttagccttgctgtcctgatcccatgcgtgttgtatattgccggcattatcgcccagttcatgatcaacatcaacgcatggaaggcggccggcagtgactatagcgtctccccaggtctcccatccctggagcttgcagatgtctttcgatccatattccactttccagaaggcctgattgccatcggtgtggtagtggtgggaattgtactcatctgcatttttggactccggatcggatggggccaaaacggagtcaccgattccgatcggaatctcactgtctcaagctctggtagctacggcacagcgagcttcatgtcaccgaaggaggcaagcgcctgctttgatgtgacaagtgcgaagaagaccgagcaggacatccttggcatgttgcctgatggtcaaatcctcacactccccaaaaacacacgcctcaattccaacctcgccgtatgtggctcgtcgggcacaggcaaatccagatccatatcccgaaatctggtcctccaggcggtgaagcgtggtgagagcctgatccttaccgatccaaaatctgaactgtatgaatccatgagcgaataccttcgagacaatggatacacagttaaggtcttcaacctgattgaaatggatcatagtgattcgtggaactgcctcaacgaagttggttccagcgaactgatggctcagaccttcgccgacatcgtactgcaaaacaccagcggagactcgaaagatgctttctggtacaacgctgagctcaacctgctaaaagcgttggtactgtatgtggcgttggaaatgcccccggagcaacgcaacctggctacagtctacgatctgctctatacacagacggagaagggcctgtccgacatcatggccagtatcagccatgagcatgtgaaccaatacaccggcgagcttcttccgccatcccctgcagccgcaccttacgccatcttcaagcagtccagcgatacggttcgaaccagtgtcatcattggcctaggcagcaagctggccgtactgcaggcgcagcaggtgcggaacatcacttcctataacgagatcgatctggaacttccgggaaagcaaaagtgtgcctacttctgcattgtgtccgaccaggacagtacctttgattttctcagctctctattcttcagctttctatttatccgcctgattcgctatgcagatggatactgcgaaggcggtatgctgagcactaaggtcaagttcgtgctagatgaatttccgaactgctgcctgatccctgacttcaccaaaaagtgctctaccatccggtcacgcggatgctcggtagccgtattcttccaaaatgtaggtcagatgcgcaaccgataccctgatgaccaatggcaggagatcctcggtgcctgtgactccacggtgtttttgggttgtaccgatatgcttacggcggagtacttcagtgatcgcattggtaccgcttctgttgaagtggagggtacaatgcgggaactcaataccatgcacatcaccaactacacaccaagattccgcaagaccaactcacttggccggcgtcaactgcttacccctgatgaggtcctgcgtttacccccggatcaagttctgatcttcattcgaggtcagaaagtcatgcgagccaagcgctatgactactccctgcatccggactataaaaagctgaagagccgcaaagcgatcctgcatgagcctgactggaagaccagccaggcttcttctgtatctgcaaccggcccttcaccatcctcatccatggccacccctgtggaaaagggcagcggcaatcggcagaagaaaccacctgcgaagccagcccgtaacactgagcgcgaggttgtgaatgcggatgacatcttctag

SEQ ID NO: 2718 - DNA, 1038 bp, Unknown
  Unknown gut bacteria
atggcgctgaatttgaattacaaacccaataagctggtcgatatcaccaccctcactgaggatcagtggttggactggcggcgcaaagggattggcggcagcgatgtagctgtcgcccttaattcctctccgtatcgcacggccagagagctctactatgacaagatcggagtggtcatggcagatgaaggcccggataagagcatcactttccaaattgggcatctgctcgaggatgtggtggctcagatcttcgccaagaagaccggcctgtctgtctttgaagaccactggatgtaccagcatcctattttcccgttcctgattgccgatgtagaccggttcgttatgcttccggatggtcgaaaggccatcctcgaatgcaaaaccgcgcactatgatatgcagttcaagtgggcgaatggctctgtgccacgccattatgagctgcaggtgcgacactacatggccgtcatgaacatcgatgtcgcctttatcgcatgcctgttttccaacaatgagaacgacttcgtatggcagaagattgagcgcgacctcgatgaggaggagaatacgattatggagctggaggcgttctggtgcaatcatgttctggctcgtgttgaaccgcctctggtagaaaagccggatgcagtgctggagtcccttcgtcgttatttcgggccggccgataagtctgagccgagtgttgatttggactgcaagttccttggcagcctgaaagaaattctgaacctgaaggaggaaaagaaggtgatcgatgcgcagtccaaagcattggagacacgcatcaagtcgctctacgcccccattgtcgagcaaatggggactgcctgtaaggcgtcctgtgagcacggcagtgagtgcttcagagtaacctacaatcctcaatacagggaagggatcaacaaggacaggctgtcagcgctgagagcccagtatccggaaatctacgacgagttcgtcgatcagacagaattgagaattttcaaggtggtcaagacggccatcgcataa

SEQ ID NO: 2719 - DNA, 801 bp, Unknown
  Unknown gut bacteria
gtggtgattgcgatggccaaagctgtttactacccgaagggtgagaggcaaaagaccatcatcaagcttttgaactctctggaagggcgctattccaggtgggatatttggcaggatttcattgtcctgtctgccgtcagcattgccaatgctttcggtggcccatacagagagcaacgcgaagcgatgtatctggagcgtagcaaaaaatactcaacctccgagctggaagtcttagcgcagatgctcgccgaagttgtcgatgagatggagcaaaatccagatcaggatatgcttggcgagctgttcatggcattgggccttgcgaatgagtggaaggggcagttctttacaccctatgacatctgcagagcgatggcagccatgaatctgggtgaggatctgaaaagtcagatagaggaaaaaggctgggtatctgtgagtgatcccgcctgtggggccggcgcattactgcttgccttcgcaaacgagtgcaaaaggaaccacatcaactatcagacttccgttttctttgtcgcgcaagacattgacttcttggcgggctgcatgtgctacatccagatgagcctactcggctgtcccggctatgtggtcattgacgattccatcctccatccggcgcagagctacgatgaggacggacttatccccaagaacagccccaatgtctggctcaccccgatgtatttcagggatgtctggcattggcggagaattttcgcacagctggacctaattactcagacaaaggagagaacgcatggaaaacctgacatgtaa

SEQ ID NO: 2720 - DNA, 654 bp, Unknown
  Unknown gut bacteria
atgttacaatgtatcaaaattaaattagttgcatatattcaatgtgaaggagggagaacgatggactatagaaagctatgtgtagaactgttcggtactgacgatgaggccacacttcgcaagatcgctgcagaatataggaagaagaacacacgcaacgctggccggaaacgcaaaatagccgacgaagatatccataaaatgagggctatgcgcaacgccggcacatccatgcaggaactggcaaggacatttgggctctctcgtcaaacggttgagcgatacctaaacacagccgcaggcgatggatgcacaatgcgcatcacttatatgttcagaaggcagccttgtacggttattgatgtagacttccttgaccaaaaggtggtcatccagaacaaaacggatgacattctgcatcgtgcattcggtgtgctggagcacccaacctggaatgactttgaaaatttcttacgggatcgctgctttcctcagacacgcggcaactgcaaggaactgcttcaagaaatggatctaacggattatgatccgttgaagatcgtagaaaagacgaggggtcgtttagctgatgacgaaatgtggttaagacttcgttatcttccgaggaaggagatcatttatgcaagtcattga

SEQ ID NO: 2721 - DNA, 666 bp, Unknown
  Unknown gut bacteria
aaaatgagcgtagcaagtatgctggaaaacatgaaaaggcgtgccctcgactccacctacgacgcatatatcagcgaggagtacgatgcatgggcagtagagtcattcgcaacggaagagggcgagtatgatgcggcaagattggagttgcccaaagtgctcagttccgagcaaatggagaagttgaagacgatggaagagagctatcggcagaatcgcaaatacgcctcccactatgggtttgaagcgggcctgttctctggcttccagttgttcttcagtgggaatgggataacagaggatggcttcgatcgctacctcatgaaaagccttatggagatgcccggtatgcagcgccatgtagactactacgcccgcaacgacgagattctccgcctggggaaggagctgggcgaggagctgacggatgaaaacaaggagcatgttgtctcgttggaatgcgcttggggccaacgcattcactcctttgcctgccacgctttctattgtggctatcgtgcggcgctgagggttattgacgcagtcggagggcttgagagcatgagtatgatcgaccacacgcttcttctggaatacagacttgggtacatcggctcctatgaacaggttgaacgggagcaggaacggaagaagaaaaccgcataa

SEQ ID NO: 2722 - DNA, 621 bp, Unknown
  Unknown gut bacteria
ctctctaagcagacatctgaggtgaaaatcctcatgatcatctgcgatgggcagccaaatgatgacggttactccggatctgcagcagaagctgatctgcgtgggatcaaactggagtatgcgcgaaaaggtgtcaaaatctacgcggcagccattggtgaagaccgcccgcgaattgagcggatctatggtgatggctatttggacatcaccaatctccaagaactgccggtgatgctgacgaacctgatcgtgcgtagcctccctcgatgcgaagggaggtgtggagaaatacagaactttgagaattacctgtgcgagcgaaatgatacgatcgacaacgctgcctaccagctgatcggcgtcctgacggcggaagaccccggtgcctctttagaggatgatcctgctaccccaaactgggatatggcgatcatcggcgaagtggttgatgcggtcaaggagatcatcatagaaaaggtcggctatacctgccatcctttctactgtgatgaggtgccttgctacctgacggacgagtgcgataacaagcactgccctctgcggcggcatgatgtcgaagacaaggagaaagcagatgaagagaaaagtagattttga

SEQ ID NO: 2723 - DNA, 390 bp, Unknown
  Unknown gut bacteria
atgaatcagaacaaacctgccgtcgtcaagaagctgcaggagcgattcagaaatgtaagcgttggtcgtggactgtatatagcatttgtgatgcctacgatgctgagcatgttttccactcgtgctttcgccgcggataccatttggacgaaggcgagtgcgatcatgcaggatgtgtatacgcaaatcctcagcatcagcaccattgccgcagttgttacggctgccgttgcgcttcttctgatgaacttctccagatccggacggacggttgacgagtcccgtgcttggttgaagcggatcatcattacttgggctatcctgaatagccttggctttatcatggcctatgtgacgcctttcttcgccggtggcacttggacgccttaa

SEQ ID NO: 2724 - DNA, 606 bp, Unknown
  Unknown gut bacteria
atgacctctgacagcacacccgtctttgcgcttgagaaggaagcgttgaagactgagattgagactggccttcaggttggcgtagatcatctggaggacaagccgatgaaacgcaagccggtggaaaagtatcacaacaccaggtacttgctcaagcaataccgcaaggtggcctatgcgatccagatctcggagtctgacatgaatgtcaggatggagatggaacatggcacccggctttccacactggaggtcaatgcagagcttgcgggggttgatttatccggctcaaagcttgaaggatatgcacgcacagtcatccggagcaagaatatgctccagatcatcaaaaacgcgctgaacacggtaaggctggatccggatcatggggagttgatgtaccagatcctctatctcacctacttctcggagaggaagctggccaaccgtgaagcaatccttgcagaactcgagcgaataggtttccaaatgtcgatggtgacttatcacagttacctcaatatggcgatcaaagccatcgaccgcattttatggggttatacggctcgtgattgtatggaaatcatcaagcaatttctgccctga

SEQ ID NO: 2725 - DNA, 546 bp, Unknown
  Unknown gut bacteria
attatgcctaattgggcgtttggaactgttaaggtgactggtactcgcgagggtgtcaagtcttttgtggagcgtttcatcagcagcgatgatcaatcaactgtccccggaaagcggttttttgcccgaagtttttccgagcagaagcgagagcagagcgtcaaggatgccatggaagaattcgaagggaaagcagataacgaaactgctgagcattccttcctcatcatgtttgcctggtctgtttggtactgcatgatcgaatgctacccccagcgaaatgatgccgagtgcatcacgctgagtgaggcctgtatggaggatcatgtagctgttgaaatccgctctacggagaccggaatgtgctttgaggaacatgtcacctgcgacgaggatggcaatctcaaccatgctgaacgagacctgagccgctgcaagtgccgcaactgcggcgagatcagcctcttcggatcctttgaggatctggacgatgctgagtgctcggaatgcggtgaacgtggtttcgaccgttgtgaggaggagtga

SEQ ID NO: 2726 - DNA, 441 bp, Unknown
  Unknown gut bacteria
atggtttcttgcgagcacttcatcgcaaagccggatgagctccttgcatcggtactcgctgcacattccaatgtgggcatccttcagactcaatccaaaggagtccgcaaaccaacggtaggcattctctcgtgtcatgatcccggtctgccagatgcggtcaaacttccggtgcgcctggatgcgcaggttccggaggtctccgttcgccggcacgcccatcggctgattggtgccgggatgcgctgccacataggtgttgcacgcggggtagttgtgacagacatagagtttccgatcgttctggcagtcgcggtagatctccgctgctggtctcaagatcatggctgctccgcaatgggggcagcggaagggtctgctgcgctgggctcgggtctttctttttttcaaaatggtcatctcctttttgcgttctactag

SEQ ID NO: 2727 - DNA, 261 bp, Unknown
  Unknown gut bacteria
atgaaagccatcaatgagcactttgaagttgggcagcaatactatgctctcgtcagtaaagaggtgttggtggtgtctgaagttttgcagcctggaatgtacccgtcaggctccggaggatactatacgctccggtcatcgatggttcggttcagaagtgagaagactggcttagtgcatacctgcagccttgagctggccaagcatctgctgcttgccaagcgacagacagcaaaagaaaaaggagttggttggtcgtga

SEQ ID NO: 2728 - DNA, 333 bp, Unknown
  Unknown gut bacteria
atgagcaccaatttacatgtaatgggcaaccgaatacggactgcgaggcaattcaggaaactgactgcggaacaactctctgagcagcttggcattgccacggagtctctgcgccatatcgaaaatggtaccagacgacccagttacgctctgttagacaacatttcggatatactcgatgtgtccctggattacctcgccggtaaaactgaacttcccctcgagcgcagagtacgccgggaacttgagaatatgggcctgacaaaagcccaagaggacgcttgtgtggagatcgcactcaatgcgatacctgtcataaagcgaatctgctaa

SEQ ID NO: 2729 - DNA, 1635 bp, Unknown
  Unknown gut bacteria
gtgacagagatgtatgttctgatcgatatggagtgggttacaaatcgccatggaaaccactggccaacacagcttgcggcaatccgtgtagatgaagaatggcagacggtggattccttctctgtactctttcggcccaaggatatcaccttccagaagtgggatcacatggccttctccggttggactcgtgacaactttctgaatgcagattcgctctatccggcacttgacgcctttgagcactggctacagcccgaggacattctctgctggtggcaccaggaggcctatgccctctataccatgttcaccaaggtagcacagatccgtgatcgggcctctaaggtagtattcctctctgactacatctacgggttcctggccggtcagaaaggtgccgtaggaagcccctataagatttgtgcggcaagagatatcacgacgccagagcctgcacactgttccatcaatgatgttttggcgatacaggctctcgttcaaagcatcgatttccagcaaagaaatctgcaggcgccacccaagaagtgggtaaaggacaccactgctctgaaaggatcaccggtgtttccgcttctctacgatacctcaacccagctgctgcaccactctgattgcgagctgcttccggataaccgttacctgccggcatacacttcgtttaaggcaccgatccggaagaggtataaaccctgcgcctgctgccatgatgaatttctggatgcgctttgggatcgtaaccaggactccatcacccgatctgattacaattatgtgtattccaagcagtccaaggtgtttcatacacgaaactgctcccatgtgctgctatcctttgacattcagggtaccgtatcctatgagacctgcttgaagagcggacgccggccctgtaaacattgtaagcccgtgccgatagagcgcaagcgtatttctttgccgataaagcaaaacaagccgcagaaagcggaaaaccgcaatctgaacggcgaagaacgaaaggccctaggtcggttcaagcgagctaaggaagaacgcgaaacagctttcaagcgcggcgatttgacggaggctgagcgcaataccgtcatggccctttcgcaacccggtcttgctttctgggcaagcaaggggtatagcaccttccacacaagaaactgctcaaagattactgggctcaaccaactcaggggttttgcgcggtatcaggacgctgtgcgagccggctattctccttgccgccattgcagacccagtcccaagctggatgtaaaattctcaattcctatcaccaataaggagcgacacggcgagactacggacacactgattcagctctgtacgcagcactgtctgcccttcgaatatgacatgcgatatttcacgctgcagaccatagccggcaagtggcgtatcgacatgagtttgcggcctgttcggctggagcatatcaatctcgtcaccgagcgcgggagcacaaagaagttccatacacagcctcgtctcttcctctccctcaaagacacctttgattacatcatgcgccatgacagcaagttgattgaagagattgtcgccaaggacaaccagagccaggagctggcaatgggttaa

SEQ ID NO: 2730 - DNA, 657 bp, Unknown
  Unknown gut bacteria
gaggcatcgcaagtgatatactgtatgtccgacatccatggcgagttggatcgcttcaaggcgatgctcgacctgatcaatttctcttcagacgatacgctatacatcataggtgatgtgatagatcgccatcccggaggcgtggaaatcctcaaaatcatcaaggacacaccgaacatgttcatgctgctaggcaaccacgagcaaatgtgtctggatacccttggccccaacagtgtgtatggaagcagacggctatggcaagagaatggtggaatcagtacatatcgagatctgctctatgtatgttcgcccactgagcgaaacaggatcatacatttcctgagtatgctgccggatcattttgatgttgaggttggcgaccgcaaattccatttggttcatgctatgccgtcagatgacccggatgatcggatttggaggaggcctaaaccggatgatcctccgtacttcgaggatcgcatcgcaatcgtcggccatacgcccacctgctacatgagtggcgatatggaaagccccttcgccatctggcatggaaatgggctgatcgatatcgattgtgggtgcgggaataagacagaactgcggcgcctcgcctgccttcgactggacgatctgaaagaattctacatctaa

SEQ ID NO: 2731 - DNA, 564 bp, Unknown
  Unknown gut bacteria
atggaaaacctgacatgtaagggactgagtgccgctcatcggagaatgctgatcaaatgcattaccgaagagattggcagcattcctgaaccggtggaaatcgagttcatggagcccattcgacggaaacagtattcatcgctatggtacggcggccagatcgctgccattcgggttcacggttgcgtttttgaggtccatgcattaggcgatgtctacgcatggctctatgacaagagcgaccgcgatcgcgaactgctctatgtgaaggacaagaacaactccggccgatttggatcggatatccagccttatctcaagactgaccatgctttggtagcagcaatctgcaggaagcacaatcggtattggatcgatatggagcataacaactggtgggaatgctctgtctatacaccggatggagttttccatgatttgatgtgggtgctggatagcgaccacattttcgctggaatcagggaggtgttctgtcacatggacgcagttctgaaggatctcggtgtcccggcgggaaacgagggttcggaggtgtcatcatga

SEQ ID NO: 2732 - DNA, 342 bp, Unknown
  Unknown gut bacteria
atggaattgtttcatttgaagaccccgtatctggattgcccgcagtgcttcttctacaactcccgcgctctttccggcacgccgtatatcggtatcgccaagcaggagcctgaaggtgctgagccgctgatggatgtaaccgcgaacttgagcgatgaagtccctctgggctgcattgccgtgaaggactacagcgaaaacactggccttttggctttcctgaagtcgatcggcttcatcacggaagtggtggagaagcgccgcagtggatatgttgagatcccgatctgccgctatgacaaagctgtcctggagagatactccaggacagccgggaggtaa

SEQ ID NO: 2733 - DNA, 237 bp, Unknown
  Unknown gut bacteria
atgaaccaatccgtattgcccggtttcgagttcctgctgatggggacaaaggaaattatgcaggagtatccgaaagcacagactgttggcggactggatgaaatgctcctgaaggtctgtcatgaggcaaataacgagtcgatatcggattctgaattccgtggcatgatctacgacctgatgctcaggaaagtagagctcatggaggatcggatgccaaaggtccagcttacctaa

SEQ ID NO: 2734 - DNA, 609 bp, Unknown
  Unknown gut bacteria
atgagcacctattatgatttcatggtcgaggccaagtacgagggtaagtggtacaacatcgactttcataccaaggatattgacggcaaattgcggcatcaatatctcgccaccatttcacgcagttttattggactgctggaggatcgggtgaacggagcatgggccattagctttgatgacttggctgagagcacgcagcagcttttgcttgcaagcccttttgaaggccgagaggatagtcttcgactggagcgcttctatgttgccgggaatctcgatgattttgaacggctgctcaacggcccgtaccagatggaatactatgtcacccgcaaccagatcgcagcttatgaagagcaaaagattgacgaaatctacgaatacctgaccgctcacgagttgctcgaattgcctcaggctgcccgaagcgagtatgtgctctatcgctggaacgatacctttgcaaacacagagaacatccgggccatggtggagcgcctgaagtatcaggttgagtgcttcaatgatgcgctcccttaccggacggatcagtcctacggcgatcgggctgcctctcagattcgtgtgatctaccgtatcacctga

SEQ ID NO: 2735 - DNA, 561 bp, Unknown
  Unknown gut bacteria
gtgcctgacatgactgattatcagaatgagcttgtaatggaacatttggatctggtcaactgggtcatccgaaccagaatctcagttcccaacagaccgctattgacctatgatgacttctatgccatcggttgtgaggccatctgccgtgccgctttgaagtaccaggcggatagcggcgaattcgcacccttcgcatgtcgctatatctacaatgccattatcgatcactgccgtgcgatgaattaccgactccagagaagtgtagatgcaggttttgaagagggcgaggtactctttgatctgcttgcccataccaccgttgacttcgaggccgaggtcactgacgattccgctatggcagcgttgcgcgcctgtaaggagaagtaccagggtgttgctcggaaaggcgtcgaggccattgagctgaagctgcagggatatgagtctgttgagattgcagatctctacgggaccaccgtcaataatgtcaatgcatggatctcgcgagcccgcagcaagctccggaacgaacctgccctgatggaaattttgtgctga

SEQ ID NO: 2736 - DNA, 468 bp, Unknown
  Unknown gut bacteria
aaggaacctgttatgaaaatgccaccacccatagcaactaagttcactaagttggttcttacgatccttgccattaccattctcggcatcatcctctcgttcgtctcccaagaccatacgctccttatgctatcagctggtgtagctgttgccggaggcgtgaagatcatcgactactatcgaacgatcaagggagagcactatgagtgcattgaagggacgcttgtccgggaacaggccggctatgcaaggaagcggcacatgatcgtgctggctttggaagacggctcgttggagcagagaatcctggaaggccgatacaagctcaagattggaaccgactatcgcttctacctcaagcgggaaccgatcgccgagatccagattgaactcccagaaatcctccagccggccatcgtcgtacttggtcatgaggagctgtctttttcgtcaggaaagcagatttag

SEQ ID NO: 2737 - DNA, 990 bp, Unknown
  Unknown gut bacteria
gtcgatatcggctgcggtatggagactgttgagcttcgtgagcgggaggtcgactttgagaagctggacgccctaatccgcagggagatcccctacggccgagaggtgagagatgagatccatgcgttgaatgcggatctcgatttatctcagctgcgctgcgcagatcaagtcaacctcaatcgcgcgatgagaagcatcggctcccttggcggcggaaaccacttcatcgaggtggatcgtgcggaagatgggcggctgtttctggtggtccactctggcagccgtcatctgggcaccgaggtggctgagtactaccagaatgagggtcggcgtgccctttggggcggcgcccagtatcaggttcaagccaccattgaccatctgaaggccgagggccggttccaggagatccagaagaccatcaaggcgctcaagaaggagcacgagctgaatatccccaaagatctggcctatgtggagggtaagctgttccaggactatatccacgatatgaagctgacacagcagttcgccatgctcaaccgcaaggccatggtggatgtcatcatgaccggcatgggcttctcggcggtggaggccttctccaccatccacaactatattgatgcggacgccatgatcctgcgtaagggctctgtctccgccaaggccggcgagaagctgctgatccccatcaacatgcgtgacggtagcctgatctgcagcggcaagggcaacgaggattggaattgctccgcacctcatggcgccggccggctgatgagccgcaaggcggccttcaatgctctgtccatggaggagttccagaaggaaatggagggtatctacaccacctgtgttgtgcccgacacgctggacgagtctcccatggcctataagagcatggaggagatcgtcgctcaaatcggccctactgcggagattattgagcggatccgtcctgtctataactttaaggcagcagac

SEQ ID NO: 2738 - DNA, 402 bp, Unknown
  Unknown gut bacteria
atgaagacaatcaaaatcaaggactactatggcatttatcaggaaattcctgtcagcgatgagctgtatgaagaatggcgtgcgctgcagaacgaaactcagcgtattcatcgaaaggaagtatatcaccgcgactggaccccgatggacgatctggaggaaatgccgcagcactttacgcttaacgagcttgaggacgctctgatctgggacgagcaggtcgtagagctctatgcggcgatttctcagttgacgcccatccagcagcgccgcatccgtatgctcatggatgatatgtcaatccgtgagattgcaaggcgggaaggctgccatatgaacgctgcattgaagtcggtcaacggagccctcaagaagctccgaggtcttctgcaagaccactaa

SEQ ID NO: 2739 - DNA, 687 bp, Unknown
  Unknown gut bacteria
atgatgacattttatgctgctgcaggcagttatcagatcagaagcgaagacggcaagaatatgccttatatcatgcggctgggaaagctgcagccagtctccattccggagttcagtctctggagtatgctcctgtgggatgtactgacctatgaggagcttcgtaaaaagttctatgacaagatggaggaaacagagatcgaaccttcctcttttgataagtcactggagatgctggttaagcgcaagctcatcatcaagggtgtaggatacactggtgcagatgcgctctacaatatgctttcggacacctatgtgattcctcttcgaggcgtccagggtacccggaagctcatgaatgttgccaagctgctcaagcagaagaaggtaaacttcttcgaggctgtttatctgctgcagccggagaagagttcggttgccgagcgtagggtcatgaaccgggtgcttcaggccccgctgagcgtaccggagctggttcgctgctttgagaacaatgtgcacgatgtgagttcggctgacaaggtcatttccgccatctacacggaggagtccgacaatcaggcgcggctgaacaacgcatccagcctctcagaccaccgacacgatgtcctgaaggcgacagcgaatctctacctgacacgccaggtcattttggaacacgcatag

SEQ ID NO: 2740 - DNA, 1320 bp, Unknown
  Unknown gut bacteria
atgcaggaggtgatagcaggtatgttatcgcctcctgctttttctttcccaacaaaagtgttgctgttggcagagatgaaccgtaaaataaagagtatgaaggaaagggagatcgttatgattacgattcaaggtttatataatactgcggtctgttacacccccgagttggaggaggcagcccgcaagcagatccagaccgtttgcgatcaggccgagtttgccggctgcaagatccggatcatgcccgatgtccacgctggcaagggctgtaccatcggtaccaccatgatcatccaggacaagatcgtgcccggtatggttggcgtcgatatcggctgcggtatggagactgtagagcttcgtgagcgggaggtcgactttgagaagctggacgccctaatccgcagggagatcccctatggccgtgaggttcgagacattcctcatgcactgaacgctgagatcgatctgactcacctccgctgcacagatcaagtcaatctcaaccgggccatgcgcagcatcggctctttgggtggcggcaaccacttcattgaggtggatcgcgcggaggatggccggttgttcctggtggtccactctggcagccgtcatctgggcaccgaggtggctgagcactaccagaatgagggtcggcgtgccctttggggcggcgcccagtatcaggttcaagccaccattgaccagctaaaggccgagggccggttccaggagattcagaagaccatcaaggcgctcaagaaggagcacgagctgaatatccccaaggatctggcctatgtggagggtaagctgttcgaggactatatccacgacatgaagctgacacagcagttcgccatgctcaaccgcaaggccatggtggatgtcatcatgaccggcatgggcttcacggcggtagaggccttcaccaccatccacaactatattgatgcggacgccatgatcctgcgtaagggctctgtctccgccaaggccggcgagaagttgctaatccccatcaacatgcgtgacggtagcctgatctgcatcggcaagggcaacgaggattggaattgctccgcacctcatggcgccggccggctgatgagccgcaaggcggccttcaatgctctgtccatggaagagttccagaaggagatggaaggaatctatacgacctgtgttgttcccgataccctggatgaatcccccatggcctataagagtatggctgagatcatagaccagattgaacctaccgttgaaatcgttcagcggattcgccctgtttacaacttcaaggcgtccgactaa

SEQ ID NO: 2741 - DNA, 1809 bp, Unknown
  Unknown gut bacteria
atggctaagaccaaactgtttgaagcttggagcttccggctccagcaaccggcgccctttgacgacccgaaatatgccggatccaagtcgatgggcttttcccagtacaacacatccagtacagctcagaagtccacgctccatgcgcctacgatgcgggccttgctcgcatacgccaagctggtgagcgcaacggagaatgggcagagtgtcgatggcctcggcgccatcgggcatcagggcactacttaccgcatcagtgagtatcgatccgccaacaagacggactgtgtggtcttcaaccccgtcaccggcaaattcaatgccgcacaggtggaggacggcacgcaggccttgaagccctattctgttggtgccggcaacggcaccggttcgggcctcctgttctgcctcatgcccgtcctcaacgaggatgacgagttccggcagaagttccaggagtttgtctccctccttgagagtggctgggcagatatggatgcggcattcgaatgcgcactgactctctgtgataatgtctaccgtcgcattgagaacagtaagcagctgggttctgatggcgtcaagatctccatccctacgactggcaatatctccgtcattacccagatggccatggacagcggcaactacgctcccaccggcgcctcttatggggagttcaccatcatgcagatgtccgggacacctacggcgaaagcgtcttccttccagaaggaggattttgtagccaagtacgcgctctccaaccgtactcttacggcacgagagctggcaatggtgcccacgctgcccgactggtacatcatccccaaagaggtcgtccgtgtctgtgagcacgccaaagtcactacggcatccagccagccaatgcgtaacttcctgttccggggcgaggctggtaccggcaagaccatgggtgcacaggcaatcgcagcagggctcaatctgccctacacgcttatgacctgcagcgccaacacggagatcaccgacctggttggtcagttcattcctgatacgggtaatttccagagcgactttaactgcacggagcttcccaaaatctccgatatcacgatgcatccgcccagtgtttacatgatgctgaccggtgagtacgacgaggagaagacggaagacgatgtgctacagaagctcatcgagattgctgttggaaatctggtggagaaggaagaaacacccggccagcgcatccgctatgtggatacacctctcgttgaggcgatccggcacggctatgtttgtgaattgcaggagccttcctgtatcgcaaaccccggcgttctggtcggcttgaactctctgctggataactgccaggtgatcactctgcccaccggagagcgtgtaaaacgccatccggatacggtgatcgtagtcacgaccaactcggactactccggatgtcgcgacatgaaccagagcgtgatttcccgtatggatctgatctatgacatggaagctcccgacttgaacacgatggtgaaacgcgtcatgaatgtcaccggttttaccgatgagcaggaggcgacgaagatggccattgtcgtgcgtgatgtcgctgagcgctgccgccagaccatgattacggacggcagctgcggtatgcgtgagtttaagagttgggtgctgtcaaccatggttactcatgacccgtatgagtcagccttgtccaccatcatttcctctgcctctgcggatccggataatcgtgccgaactgatctctgcgtgtttggagccccagtacgcaagaacaatttga

SEQ ID NO: 2742 - DNA, 930 bp, Unknown
  Unknown gut bacteria
atgattatttctgtcgatcacggcaataagtcgattaagacccccaacgcgctgttcacttccggcctgattgtatccgaggggctccagggcttcaaaacggactacatctgctggaacaacaagtactatacgctgacagagcagcgcatcgcctatctccgcgataagacggaggatgagcgtttctatgtcctcaccctctttgccatcgccaaggagctggagcgccgcaaggtgcccgagacactcgatcccattgacattaccctgcttgtgggtctgcctcccgcacactatgagcagctgcacagccgtttcgagcagtacttcctgcgccgacgcgagatcgtggattttgagtataacggaaagtactactcgatccgggtcagcaaggtactcagctatccccaggcatttgcggctgccgttacccagttcggcacgctgaaagctcattccgttgcctatatcattgacattggcggctttaccatcgaggtcctgaagctgcgcagcggccatcaggatctggcggtggtagagagcttcgagaagtgtgtcattaccctctacaacggtatcgcaagcaagtgtaatgcgctctatgcccggatcctggaagactgcgatatcgacgaggtcatccgaaaccagcccaccgtccttcccggcgaggtacagcagttgatccgtaccatgaccaatgacttccttacggagttctacaacttcctgcgtgagcgaggcgttgatgtctccaccagtaaatgcgtctttgctggtggcggttccttgctcctgcgtggaatgatcgaacgcggtaacaaagtagctttccccattttcatcgaggatattcatgccaatgctcgcggctatgaactcctctaccagagtgaggtggcggcaaatgggcagcaataa

SEQ ID NO: 2743 - DNA, 2211 bp, Unknown
  Unknown gut bacteria
atgctatgtcgatatgagcgcaccatcttcaagtcggataagggcttctgcatcttctcctacagcaccgaggatcagtcagttcccaaggaagcgcataaccgatcgttctaccacgacgacaagatccacttcacggcaatcggctatcaccttgtagcctcaaatgccgtggaagtagaacttgatggcacctgggagaactcgaaacatggtcttcagctatcggtctcaatgtgtaaggagattgttcctacaaatcaggctggtatcctcgcatacctgagtagtggtgtgattaagggcgttggcccggagattgccaaagccattgttgcaaggtttggggataagaccatggaggtgctggacaaggagccacagaagctgctgagcatcaagggaatcgcccagaggaagctcaaggccatcatcgcctcctatgaggagacaaaggccctgagcgaccttatgatctacttggcgccgtttggtgtttcaatgaagaaggctgcgatgatcaaagaagagttcggcgacaacagcctgaagatcgtgaagtcggatcccttccagctttgtaagatcaaagggtttggctttatgaccgtggactcgattgcgcgcaaaaccaaggtaagcctaaagcatcctatgcgatactccggcgcaatcaattatgtgctggatgaggccagggtatctgggcatctctttctcaccgttgatgagaccgtgggtcagtgctatgacctgctcaactcagattgtgaagaagaggtggtctccgaggaggagatccgacaggccatctccaatgagcgtgttgagtcccgtgtctatgttgagggatctcgtgtgtacctgagctatgagcgtatgtgcgaagtcaaagctgccaagcggattgtgtccatgctcctccaggaagggttcgatgagatccgtgacctggatgaaaagatcgatcgggcggagaaaaacttgcatcagagactggccccttctcagcgcaatgctgtgaagctatgcttgtcctatcccatatccatcatgactggtggaccgggcagcggcaagacgacgacgctaaggtttatcttggacatctaccaggcagcgttcccgtcaaacgagatccttttggctgcccccaccggtagagccagtcggcgaatgtcggagcaaacgggcaaatatgcctccacgcttcactctgctcttggtctggtcaccgaagaggatagtccactcaacgatacggaaatgctttctgcagatcttatcgtggtggatgagttctccatggtggatatgcgccttgcgtatgtgctgatggagcgaatcaagccaggagcccaactgatcatcgtaggtgatgctgaccagcttccatctgtcggtgccggcaatgtgttacgggagatgatccgtagcgagaaggtgccaacggcaggtttggaaacggtattccggcaggcatccaatagtcggataatcaccaatgcccatgcaatcaatcataatgacacacatctacagtatggggatgacttccagatgctcgaagtgcaaaactcggaagaggcagcgcggctggtcattaaaaactatctgcgcgaagttgcaattcatggcatagagaatgttcagatcctatcgccgtttcggaagcgtggcgctgtggcgtccaatgcattgaacgagacaatacgggaactcgtcaaccctcagaacaagctgaaaaaggaaatgaagtgtggcagccgggtcttccgtgtgggcgatcgcattatgcagactgtaaacaggatcaatgtgtcgaatggcgatgtcggtatcataaccgacgtggagacagaggatgatgatacgattgcgcgtgtcaagcttctggatgggcgtgagctgagctatacgcaggaaatgttggaggaccttgagttttcctactgtacgaccatccataagagccaaggacaagagtatccggtcatcatcgttcctcttctgaaggagcactatatcatgttgcggcgaaacctgctctatacagcggtgaccagagccaaggcaaaggtcattctgattgggcagaaacaagccgtatttattgcgatccacaaatgtgatgtgggtcaacggaacaccgtcctcgctgatcgaatcgtggcttactacaaccgcgagctcagcaagcgagtgacttga

SEQ ID NO: 2744 - DNA, 513 bp, Unknown
  Unknown gut bacteria
atgtatagcgctgctatccagagatatttcaatgagcacatccatctgccgtattccttcttcctgcagcctcagcgttttatccgacatgcactcaagaagaagggtgcgttcatggcaaccgcatacaactatgtcgagcccagcgaggctgacaatgaagacattatcgagtatcttgctacagacttcgatgtcatggccggcaacacggctggccggctctgcgttttaatgaagcttccagagcccacgatgcctctgcactgtaagatgattggttgctccatcaagcgggatgggagcaatcccatctggcgcacgatcgagctgactgagcaagggactctgctcctgtgtggttggggcgaaggccatacacatatgacgatttgtgaggtgggctctgagcccgatcaattcattcctcgcttaacgcaggaactggccactgctacggctttttggtctcatgtcactggtacaggtttccctgtggctggacgaccttga

SEQ ID NO: 2745 - DNA, 255 bp, Unknown
  Unknown gut bacteria
atgaacatattgcaaaagctgtttcaaggaaaatgcattcctgtttcagagcatggcgggaactcatcttgtgaatatgaggtagccgtggaaaaactttgtaagattgcagaaaccctgcgacaatatggcgtgccggaagagctgatttctgcgcttgataaagcggagaacgagatccttgcattggaagagaagcggatgttccgttttgcgattcgatatcgagcagaattacagcgagagcttatgtga

SEQ ID NO: 2746 - DNA, 336 bp, Unknown
  Unknown gut bacteria
atgaaagtcgaaagagaatcctttgtccgttttgccgttgcggttgctttggcctgctatgacctgcccgcagatcgggccatgacctccgacaaggccgcaaggctcgtgaagtgggtcatcgacatggcactcggccctgctgcgtctggcgtgctcgttgagcctatgcggaactatcctccctccgggaagatgccgctgatcatcagcgtagccggcgtccagcagcacctgttctggttctacccccagcagcccttcgaggagatgtgtgaaacgctctcagcgatgctcaaagagatccccgtcacctgtgacagtgtcccggcgtga

SEQ ID NO: 2747 - DNA, 195 bp, Unknown
  Unknown gut bacteria
atgagcagttttcgaattcccttggtttggcagatgtacgggcatgtggatgtagaggctgataccctggacgacgctatcgaatacgccttggggccggattgcccgcttcctgaaggcgagtatgtagatgactcgatccaggtggacgatctggttttgaaccaggaggcaacccatgaaagccatcaatga

SEQ ID NO: 2748 - DNA, 342 bp, Unknown
  Unknown gut bacteria
atgaacagccaacttgagatgctgcgaaaggctgctgaggatctcggccttaccgtcgtggcagaagtgactgtttttgaaagtggcactgacccgcagcggcagagcatcaaaacgctgatccgagatggaaaacacggcgcctatgattgcgtgctgattgttgatccatccagattatcaaggagcactgggggctacaccttgattggccagaagctgaaccggcatgggatcagggtctatacccctcagggaaagatccagctgcccccgcctcacgccttcttctattccagataccataaggaaggagaaaacgattttggcccaggaaagtaa

SEQ ID NO: 2749 - DNA, 348 bp, Unknown
  Unknown gut bacteria
cggagggtcgcttgcgcagaagtccagcacattgtctcgcattttgatgaatgcccagaataccatgacagattcaagggtctttccgtggtccagcgagtacctacttgtggcaaggaattggccgtccggcgaaaagtaggccagaccctctcgccggagtcgtgcgaggatctggccataggaacgattgctcaaatgattgaagagcaaccgcatttgtcgctgttcaacgaccccgaagatggtcagcagccgaatgataaaggccacttctcgatctcgggcagcatatgcaaacttcattttgctctcctttgtgtagacttaggaaaccgcatagtgtaa

SEQ ID NO: 2750 - DNA, 141 bp, Unknown
  Unknown gut bacteria
ttggacgccttaaaggagaaacaagatatgaaaaaaagcatcatctgcttggtatccggtatcgtcgctggtatcgccatgtgcttgacagcggcttacttcctgcctgagagcagcttcgacgacgaattgggctgcttc

SEQ ID NO: 2751 - DNA, 699 bp, Clostridium ramosum
aaaatcgttttagtaacaattgttttagcaattattatgagtgaaattacggcgatgcagtcaatcattaaggctctgctggccagtgggggaatcttagcagttgtagttgggttagcatcacaagaagctgcaagtaatatgatcaatggttttatgatcatgacttataagccttataaaattggtgattttgtcaatgttagagaatataatgttattggaactgtaattgatatttcaatgcgccacagtgtcattgaaacattagaaagaacacaggtaattatacctaatacgataatgaataaagcaattattgaaaatgtatctaatgttaagactcaaaaagccaactatttatatcttgaggtttcttacgaaagtgatattcaaaaagcaattgaaattattcaagaagaaggaagtaaacattcattatgtttagatggcagaactaaagcacaaaagaaaaaacatgaaccaatggttaaagttcattgtgtcgaatttaatgatagtggaattcaattacgagcaacattattatctaaggatagtggtgctggttttcaattattatcagatttgcgtttgattattaagaaacgttttgatgaaaacgggattgatattccatatccgcatcgagttgtaattaatgaaactagagaaaaaaatgatgaacaaacaaaatag

SEQ ID NO: 2752 - DNA, 477 bp, Clostridium ramosum
atgtttttagaaaaaatagacgatacaaacgatcttaaaaaattgaatagaaaagaattaaaagaacttgctaacgaagttagagcagcattgattaataagattagtaaagccggcggacatagtggtcccaatttagggatggtagaaatgacagtagctttacattatgtttttgattcaccaaatgataaattcgtttttgatgtttcccatcagtcttatccacacaaaatattgaccggcagaaaagaggcatttctagatgaagaacatttccatgacgtaacaggatataccaacccacttgaaagtgaacatgacatgtttacaattggtcacacttctacatctgtatcacttgctcttgggttagcaattggaagagatttgaataaaaaagccgaaaatattatcgctattattggcgatggttctttatcaggtggagaagcactagaagctatcgattatgca

SEQ ID NO: 2753 - DNA, 642 bp, Clostridium ramosum
atgaaactagagaaaaaaatgatgaacaaacaaaataggtggttagatttagctcaagagttacaatttttagctcaaggtggattagcatatacaaaagataaatttgatcaagaaagatttgagcgaattcgtcaaatatctgcagaaatggtcgctttacaaagtgatttaccgattgcagcagttacttcattattttgtaatgaaacagggtttcaaacaccaaaattagattctcgtggtgctgtttttaaaggtgataagattttgctggtgcaggaatctgatggacgctggtcaattcccggtggttgggtagatgctttagcaagtgttaaagaaaatacaattagggaattacaagaagaagccgggattgaggctcagatagttaaagtaattgcaattctagatcgtaatattcataatacgcctcgctatgcgtatggaattactaagattttcatagaatgttcttatcttggtggtgcatttaaaccaaatattgaaacacttgatagtggttattttagcctagatgaacttcctgaattagctgaggagaaagtaactttagaacagataaaaatgtgcttcaaagcacattttgatgataattggcaatgtttatgcgattaa

SEQ ID NO: 2754 - DNA, 582 bp, Clostridium ramosum
tttaaaattgaggctgaagagagtgttggtagtggagtgcgtcgaattgaggcggttactggaaagactgcttatcaagcgttagttcaagaaaaagaaacggttgatattattagtaatattttaaaacttaaaaatcgtaaagaagtagttgcaaaagttactgcattaactgaagaactttccaacactaaaaaagagattgaaatattaagcggacaattaaatgcgctaaatgcagcaagtaaagccaatgatattcaagaaatcaatggagttaaagtgttgtttgtagaagaaatgattgatgctgctaaagcgaaacaacttgcctttgattttagagataaaattgaagaaggaattgtaattttagtaacacaatttgaggacaaatgttcatactttgtcggggtgactaaaaattatgttgcaactggatataaagctggtgatattattaaaaaaatcaatgcagttgttgatggtcgcggtggtggaaagccggattttgctcaaggtggctgcccaattaatgataagatttccaacatcaagggagaacttaaaaatttcttttaa

SEQ ID NO: 2755 - DNA, 666 bp, Clostridium ramosum
atggaaattagacaaattgaattagacggtcaaattattgagtatcaattaaattttaaaccaatcaaacgttgttatttgaagattgtttctggtaaagtagtagtaaatagttcttcggctttttcaattactgctatagaaaaattgattcgtgataatcaacaagtcgttttaaaacaaattaagaattatcttcctaaatatcaatatattaataatggctatgtgtatatctttaatcagcgttatcaaattgttgtacgcgatttaaatcaacgcaaagtagcttttcatgaaaataaattatttgtgtatcatcatcaagttcaagagacaatagaacgagagttaaaacaaattttaaataaatatttagaatttaaaattaaagaatatttaaaaagtaattttagtttaaatatgccggtaattcagattaagaagttaaaagctcgttggggagcgtgtttttcaaatcaaaataaggtttgttttaatttggttctagtacatctagaaaaagaattgattgattatgtaattgttcatgaactatgtcattttattcagcctaatcactcaaagctattttatcaagaagtacaaaagaggctcccggattacaaagagcgcgagaaaaagttaaaggagattggaatatga

SEQ ID NO: 2756 - DNA, 990 bp, Clostridium ramosum
atgcagacattaattaatattgtcgtttttattttgattcttggaatcgttgtgctgatccatgagttaggacattttattacggctaaatcgtttggggtttattgtagtgaattttcaattgggatgggaccaaagatattttcgcgcaaaaaaggtgagacagaatatgaaatcagagctttaccaattggtggttttgtatcaatggctggagaggctgataatgatattgaggaatttaaagatgttccaattgagcgtactttaaagggcattagctgctggaaaaagtgtgttgtttttttagccggagtctttatgaattttgttctatcattagtaattttaattggtgtttattgtgtaatagatgttcaaactaatacacctgaaatcgggaaagttacttcggacagtcccgcaatgattgcaggccttgaggcgggagatactatttctaaaattacttatgatggtcatgaaaatattattgcatcttttgcagacattcgtgaagtgttgaataatgataatcttaaatcaaaaaatgctacaataatgttacaagttgaattggtccgtgatggtaaaacaattactaaagaagttaatgcaaaatataatagtgattctaattcatacacaatgggtttgactccagcaacaagaaatttaagcttttttgaagctattaattatggagtaactaaatttgtagagatggcgctgttgatttttacaacattaggtaagctatttacagactccgctaatacaattggacaattgtcaggaccagcgggaatttacaacgtaacggctcaaattactgaaacaggatcaattagtcaattattaacattgctagctttattatcgactaatattggaatgttcaatttattgcctattcctggtttagacggttgtcaagttatctttgctgtggttgaaagagtaatcgggcgtgaattaccgttaaaggtt

SEQ ID NO: 2757 - DNA, 477 bp, Clostridium ramosum
aagttaacatgggtcaataatcgttatattaaagaaagatcattagaagatgttgttgcattatgtcgaccatttttagaagaggcttatgatctatcaagtaaatcagaacaatggatcaatgatttagttgcaacgtatcatgatcaattatcttatggtaaagaaattgttagtttagtcgatttattctttacagatgaattgaatttagatgaagaagctaaagaatttatgaaagatgaaactattcctaatacgttaaaagtatttaaagcgcaattagagaatttagaagaatttactaaagaaaatattcaagcttgtattaaagcaactcaaaaagaggctaaagctaaaggaaaaatgttatatatgccacttagaattgcaacaacaggaatcatgcatggacctgatcttgcgagttcaatttgcttattaggaaaagaaaaagtattatctagattagggtaa

SEQ ID NO: 2758 - DNA, 939 bp, Clostridium ramosum
atgaaaaaaatcttagaagttaaaaatattaataaaagctaccagcataacaaggctatcaataacttatctttcaacgtctatgatggtgagattcttggcttattagggcctaatggtgctggtaaaagtaccacaatcaatattctatcaacacttttaaccagtgatactggcaccattaacatatttaacttgcccttaacatctcactctaataaaataaaagctcaactcggtattgtccctcaagaaattgcattatacgaagatatttcagcctatcataatgtagcctttttcgcttcattatacggtgttaaaaagaaagatttaccaaaacaagtaatgaatgccttaacttttgtcggcttatccgataaaaaaaatgatgatcctagaacctttagcggtggaatgaaacgacgtttaaatatagcctgtgcaattgcccataatcctaaattattaattctagatgaaccaaccgtaggaattgatccacaatcacgaaattatattttatcctcattaaaggagttaaaagaaaaaggtacaactattatttatacgacccattatatggaagaagttgaagaaatcgctgatcgaatcgttattatggatagaggcactaagatcgccgaaggaacattaaaagaacttttagccaaatataaagacactcttatctacaccatctatgctgataattttccagtcgatctagcaatatcactaagtactatcaatggtgttgaagagatcaaaactaatgcagataattttaaaatcacagtttctaaaaattacgacgcattagataagatcattatgctttttgttcacaaaaaatgtcatattaataaaatggaaacagaagaaggaaatttagaaatggtatttttaggtctaaccgggaagaagctaagggattga

SEQ ID NO: 2759 - DNA, 411 bp, Clostridium ramosum
atggaatttaaaagcttgatgcatgtatcttttttcactgatcaaatggatgtgatgagagacttttatgaaaataagttaggattaaaagttaaaattgtaacaagggcgggactttataaaggactaaatcgtggtaaatatagtgaagtagctgaagttgatccaaacagaattatcattgtttatattgaaattgcccctggacagtttattgaactatttccaaaggatgaaggacaagcgccacatgatgagtggaaccagaggctggggtattcacactttgcgttattggttgaggatatagaaaaaacttatcgagaactagttgaatgtggagttgcaatagatacacctatttctaaaggtccatcacatacctatcaaatgtgggtgcatgatcctgat

SEQ ID NO: 2760 - DNA, 516 bp, Clostridium ramosum
gagattattcatgttggtcataaagatattcgtggatgtatcggttgtcgtcaatgtaagacgaaagggaaatgtgtatttaatgatattgttaatgatattgcaccaaaatttaaagaatgtgatggcattgttattggttcaccagtttattttgcgtcggcaaatggaaccttagtatcatttattgatcggttattttatagtatgactgctgataaaacaatgaaagttggggcggctgtagttagttgtcgtcgagggggtaatagtgctacatttgatgaattaaataaatattttactatttctcaaatgccgatagcctctagccaatattggaatatggtacatggtaattcaccagaagaagtacagcaggaccttgaaggactacaaacgatgagaactcttggtaagaatatggcttttttaattaaaagtattcaattaggtaaaaaggaatttggattaccggaaaaagaggagcataaattcactaattttattcgataa

SEQ ID NO: 2761 - DNA, 951 bp, Clostridium ramosum
gtgaatagttcacgtgtaaacaaatatcgcgatttacgagctggtttaaaagatgaagcagggattaatcgtgaaaatatagaggatacaattgatatcattgatgatattgaagatgatgattttttagcgacaataaatcgttcttttaaacaagaagaaaaagacttgccagatattaatgacactttgacagaagctaaaacttttgaacaaatgcgtcaagaaagcagtgaagaaataaaccgagctttgcgaagtgctaaggtcagtgttggtaaagaagcgcagtacaatacaagaatggatattttaaataaaattagagaaccagaaaagcaagtagttcatatcgataatctggataatatcaatacttcagaattttctaaagggtattttgtaaatcaggaggaatcggttgttacaaaagctgaagaagaaaaaaaggctgctaaaaagaagatgactttaatggaacgacttgccagcatgtcaccagaagaagatgctaaaaaagctaagctggtaatggacgaagttcaggaagaagcagagcaaaaagaaaatgaacttgaagaagcattgaaaaaagatacaggtgttgtgagttctggaacagctgaggacactttagaagatgaagaattggcaaaaattgaacaaacacgttcgttagaggaaatgcttcgacagattaaagagaaagatcagcgagaggttgaaaaagtacttaaacaaaaagaagacacagcagatttaaaagtgattaaaaatcaaacaaatgataaaactatagatagtaaatcaaaggcaaaacaatctcgtagtgatattgttgatgaaaagaaaagtgatcgaatcgctactatcttaaactatgtaattatattcctagtagttgtatttattggattgtgtggtatgataggataccagttgttcttttaa

SEQ ID NO: 2762 - DNA, 936 bp, Clostridium ramosum
atgagcgatgtaattagactaattagtgcttcaggcagtgattttgaaaaaatgacaccgatggaattgaaagaatcaatttttaaatcagaagggcgggtaatcatgggacagcatttattatttgctggtgaaggattagttagaggaataactaattctgaggtgatgtttgcttttggtgctgatatggttatgcttaatacaatggatttagataatatggaaaataataaaggacttcaaggattatcttaccaaaccttaaggcaacgttgtaaaaggccacttgggatttatttaggttgtcccaaagcgggatttgaagacggtggtaaaaaagctttatatcgccgtgaaggaatgctttgtacacctgaacatgttcaaaaatgtgttgacatgggagttgattttattgttttgggtggtaatcctggtagtggaacttcaattaatgacgtaattgcttgtactaaatggatcaaggaaaagtatggtgatcaattattcgtctttgctggaaaatgggaagatggtataaacgaaaaggtgctcggagatcctctggctaatcgagatgctaaagagataattaaagaattgattgatgcgggagccgattgtattgatttaccagccccaggaagtagagcaggcatcagtgtcacgatgattcgggaactagttgaatacattcatagttataaaccaggcactctggcaatgagctttttgaatagttcagttgaaggggctgacccagatacggtacgcttgattgcgttaaagatgaaagaaactggtgctgatattcatgctattggtgatggtggcttttcgggatgtacttcaccagaaaatattcaccaattgagtatttcaattaaagggcgaccttatacatattttagaatggcaagtgttaataaatag

SEQ ID NO: 2763 - DNA, 795 bp, Clostridium ramosum
atgagtagatttccagataattttttatggggtggagctagtgctgattttcaatatgagggtggatttggtgaaggtaatcgcggcttgattacagcagattttgtaacagatggtaatgttgatacgttacgtcaggtaacttataagtgtaaagatggaacgcttggttcgtcaccattaaaggctgaaattcctgaaggagcaactggatatattgatcctgagcgttattatccaagtcatgatggagttgatttttatcatcgttataaagaagatatcgctttaatggcagaaatgggatttaatgtttatcgttttagtatttgctggacaagaatttttccgacaggcgaagaggctgaaggaaatgagttaggtttgaagttttatgagaatgttattgatgaattattaaagtatcacatagagcctttaattacaatttgtcatgatgaaattcctgcatatttagctgatcattatgatggatggtcatcacgccatacaattaattgctacttaaaattatgtaaaacattatttgaacgttttaaagggaaagtaaaatattggttgacatttaatgagcttaatgttgtaaagggttatgctcaaatgggaactcataaaattgatagtcaaacgcattatcaagcgatgcatcatgtttttgttgctagttcattggcaacaaaaatggctcatgaaatgatgccagggtgcatggtaggaacaatggatgcaatgagtggtttatatccattaacttgcaagcctgaggacatgatg

SEQ ID NO: 2764 - DNA, 858 bp, Clostridium ramosum
ttaaataatttgaaacttgatacacgtaataatgtatatggaatgtttaatgattatccagtagtagtgatgtttgggagtgctaacaatgacctaattattacaatcgatactattggggaagatcgaactgctctagatgaatattttaataatttaagaacaatattaacaaacattaaaactattaattatagtaatggaacaattaccttaagtgctttgcgaagtgaggaattacatgaagtatatgagattttaaatcgaattactttaaagttaagagatctgggcttccttccaagttgtggaacttgtcatattaataaaccaacttcattctatgagtatcatggtcaattgatgaatatgtgtgatgactgtagagatgcaatcagtacccaagctgaagaaatcgttgaggacagtagccgaggaatcattggtgctgtggctggtgctctaattggtggtgtgctttgggcattggtgtatcaaatcggttttatcgtcgcattcttaggttatttaattgtttttttagcgataaatggttatcagcgaatggctggtaaaatttctaaaaaaggattaataatttcaattatttgtagcgttttggtactgttttttgcagaatcaatcagcttagggctaaaaattaaagatctgatgcaattacaaagtatttttactgcattttcatatattccttacttcctttcattcagtgaaatctttgctattgtagttagagatatagtccttggattaatctttatgggattaggaagctggcaatatatttataagattaaaaagtctttggatgaagaaaatctaaataaactcgattaa

SEQ ID NO: 2765 - DNA, 615 bp, Clostridium ramosum
atggaaataatcacagtcgatcaaaataatttggagaaggagcatatttgttgtgcaatttctagtaataatgatatccaagttaaagctaaaaaagcttggcttgaggaacagtttaaatgcggattgatttttaaaaagatggatgtaaggggaaagtgttttattgaatatttaccacttgaagaagcttgggtacctatcgtaggtgatgatcttatgcatattaattgtctttgggtatctggaaaatatcaaggacagggattagctaaaaaattgttggaagcttgtattgaagattgtcgtaaacagaagaaacatggaataactgttatttctgcaaaaaggaaaatgccgtttgtaatggattataaatttttaattaagcatggttttatttcaataatgagtctagataaatatgaattaatgtatttaagtttagattctcaagcagttcaaccaagttttacgattaaagaaatgacttgtgaggaaggtggattagttttatattatagtcatcagtgtccttttacagctaaatatgccccgatgattgaagcgtatcgtcaagaaaaaggtttactaattaaattaaaactattaaat

SEQ ID NO: 2766 - DNA, 432 bp, Clostridium ramosum
atgttaataattcacaaacttgaacatactcacttttcatcaagtgaagctattattattgactacattcttgaacaaggtttaaaaataaagaatatgtcagccaacagtattgctaaagcaacattcacttctgccccacttttagtacgtattgccaaaaaattaggttattccggctggaacgcctttaaagaagattttattgcagaacccgaatatttatttaaagaacaaaaggtcgatgctagtattccttttgttgttagtgatgatattatgacaatttctaataatatcggtcaacttcaaattgatgcgattcaagacacgatgtccatgctgaatcatgatgacttacaaacggccttacgttatcttcgaaatgctaaagaattagatctctatggagtttctaataaccttttatta

SEQ ID NO: 2767 - DNA, 474 bp, Clostridium ramosum
tttgctaaacagattgcacgtaaaattgaacaaaaacgacaaatacgaccaattgaaacaacttttgaattagttgatattattaaagatgcaattcctgcttttgcccgacgtaaaggaggtcatcctgctaagcggacttttcaggcccttagaatagcagttaatgatgaattaaatgtctttgatcgagccttaaaggattcgctagatttattgaacgttgggggtagaatttcagttattactttccatagtttggaagataaaatatgtaaatatacatttaatgatgtaactaagttaaaggatgtgccaccgggattaccagtaattcctgattacttacagccgagatttaaattaattaataaaaaagcaatggttgcttcaaaagaagagcttgaagttaatcatcgcgcgcattctgcaaaactaagaataatcgagagggagtttgaaaatgagacataa

SEQ ID NO: 2768 - DNA, 996 bp, Clostridium ramosum
tcagaaaataatattgaaacaattaatgttacattaaattatgatcaaaacaacaatgattttattgaagtttcaaaactatcatatttagcctttgatgaacaagttattttagggcaagcaaattcttcaacaattacttgccagcttgtcagtctagactgccctttaattactatttatgaatatgatagcgactatgcttacaattataccctgcaatcttatgaaaatttagaaaaatgttttaaaaaaaattatcaaaatcttgatcaaaacggttattatcaaaatattgattctaatcaaaagcagattctagaaacaacaagtacaattacatcaagtatttgtattcaagaattatcaggaaaatatagccagcatactgactttaatgagctatatggaattaatgattttaatgaaaaaggctatttagtctggtatcaatttgatggtttatttgaagagtataccttttttgattatttagcaacacactattataactatttattagcgctcatccttttagggatgatctatcttggagtaggaataatctttgctgaaaaaaaacaaattccagtttctcctgattctaaagcttcgagttttgattcgattccagaaaatatagaagaaatagatatttcacaactaatcacccaattagtacacaacagtgctaatgtgttgaattttaaaaagataaagttatcctataaaccacaaatgatgattatcaaaggtaatcgtgaacagataattgatttggttacaaggttatataatttttctctgcgccatagtaatcaaaacgacgaactaattattgaattaaatcatcataaaataactttttcaaataataattttaattatcttgatgatgatctaaaaacccttaatgactgtattgagattattaaaagacaccaatatcactattcttttactaatcggagcttatcaataaagatcggagcatga

SEQ ID NO: 2769 - DNA, 417 bp, Clostridium ramosum
atggcacttttagttgatggtgatgcttgtcctgatttaccagcaattaaagatttagcttggaaatatcaggttgaaatgacggtttttgttgattatgctcattttatacaggatgattattttagaactattctatgtgaagtgggaagtgacagtgttgatctagttttattgaaacaggttcaagcaaatgatcttgttattactcaggactatggtctagcaagtttagtgttatcaaaaggggctaaagttttgcatatttcaggaaaagtaattgatgataataatattgaagaattattaatgagtcgttatgtatcagctaaacaacgaaaaagtggtaggcggacacgtggaccagctaaaagaactgatgaagtaagaaatcagtttttaaaacaattagataaa

SEQ ID NO: 2770 - DNA, 660 bp, Clostridium ramosum
atgggtaatttaatgaaaaaactcaagaaaaccaaaatggttaaacagtttggaattttatcgttagtattggctatgttaattggggtgatgtcaaatggaaccataattaatgcggttgatggtaatgctgatgcgaacattacatttaactcacgaatcgtagaaaaagtcaatggacaggatgttgatgtttcacaagctgattcaggagattcattctttttggcaatttattatgctgtttcagcaagtacagatgcttccaagtatactgagtgtacgttgagtatcacgttgccaaacgatattgagttcgatgaaacaacagatattagtaatactggttttgattcaattgaacaaagaacatcactagggaaaaatattctatcaattaaaagtaaagaattggcggctggacaatcaggtacgttatatttaaaaatgcattttaagaatatgacaactaagaatggcacaactgctaagtttgttgatatgaaaatgacaggttctatggttaatgaaaatggaagttatacaattaacccagtctctgtacctgatgcttcagttaccgcaaaagctagtcaagaatggactgtagggaaaaatgttattcagcaagcagatggtaataattacacgattaaatca

SEQ ID NO: 2771 - DNA, 891 bp, Clostridium ramosum
gcacgaattagacgtattggagtagataaagaaacaatcaatacttgttatgtaatcgataattttcgtcatcttttgggaattgttactttgagaaagttagttttatcatcacaaagtgctttgattgaggagattatgaacgataatcttattacagttcatacgatggaggatcaagaggatgtagcacatgattttcaaaaatatgacttaacttcaatgcctgtggttgataatgaaaatcgtttagttggaatcattacagttgatgatattgttgatatcatgcaggaagaaacaactgaagatatcgaaaaaatggccgcaatggtaccgtcagacaagccttatattaaaaatggcccgtttgaaacatttaaaaaaagaataccgtggcttttgttattaatgatttcagcttctattactggaaaaatcattcaaggatttgagcatgctttagcgggctctgtgattttaacggcttttattccaatgttaatggatactggtggtaattcaggttcgcaagcctctgtctcaattattcgggctttgtcactagatgaaatcaaacatagtgatatcgtcaaaattgtttttaaagaatttagagctgcaattttagttggggttactttagcagcatgtaattttattaaaatgatgattattgatcatgtttcaatcatgatagctgctgtagtttgtctaactttgatagttactgtaatcattgctaaaatcgttggctgcactttaccaattttagctgataaattaggctttgatcccgctgtgatggctagcccgtttatcactacgatcgttgatgctttgtcattgttgatctattttacggttgctactaatttattaaatttataa

SEQ ID NO: 2772 - DNA, 744 bp, Clostridium ramosum
ttaggtattttaggaacagggatgattgttaaagacttattaacaactataaataagttaaagattgaatcaatttcgattttagggactgaacaaactaagaaagagactactattctcgctaagcaatatcatctagatcattgttattatgactatgatgaaatgttgcgaagtgaaatcgatacagtgtatgttgccttgccaaatcatttacattttagttttgctaaaaaagctttattaaaaggtaagcatgtaataatggaaaaacctattacttcaaatgttaaggaattggaagaattaaaagaaattgctcaagaaaacgatctaattattttagaagcagttaatatccattatttacctgcttttaaaaaattgaaagaagatataaagagaattggaaatattaaaatcatgaattttaattatagtcaatattcttcacgatatgatgcttttaaacaaggaacaattttaccggcatttgattatcataaatcaggtggagctttgatggatatcaatgtttataatgttaatgcaataataagtttatttggtcaaccagtaagtattgggtatatggcaaatattgagaatcaaattgatacaagtggtattctaatgtacgattatggttcgtttaaggggataagtataggggctaaagattgcaaagcaccgattatttcaacgattcaaggtgataaaggggttattaaaattgataaacat

SEQ ID NO: 2773 - DNA, 999 bp, Clostridium ramosum
atgaaattaggtaaatgtgctgcggcactagtcgtgactagtttcttattaactggttgtcaaaacagctcgaaaacagttaaagaagatgggaaatatatagttgcttctttaaacagtgggaaaaaagataaaaatatttttgcggatgatatttttaacgatgtaatatctactgccagtggaaaaagttcatactttaatgccgtgcttcaacaattaatggatcaaaaattcccaatcgatgaggatatggaaactgatgctaatgaaacagttgatcaaatccaaacttactatgaaaatcaatatggcgataatgctgaaactcaattacaaacagcgttaagttcaagtggatttaattcacttgatgaatatcgtgaaaacatggtgagagtctatcaaagatgcaactttttattagcttacgttgaaaagaactttgatgaagttttcgatgattattacactcaagcaagtccacgtgaagctagtcttattaaagtttcaatgactgatgttgaaaatccaacagctgatgaaacagcaaaattgagtgaagtcactgctttattaagctcaagtaaaagttttggagatatcgccaaagattactctgatgatacaaacactaacaagaataaaggaaaattaggtattgtagatactacaagtggtctttcacaaacattcggtagtgatgttgaaactaaaatattagcacttgccagtggtgaaactagtgaagccataaaaggtactgatggatattattttgtaaaagttactagtactgataaagatagtataaaaaaagaaataaaaaaagatttatctattgatactccattgattgcatatgataagtatatgagctatattgtttatcaatcttataatgttaaatacgatgataaaaatactgaaaaaataattaataatgtaattgatgaagctttaaaagaacgcgaaactagccgaggaggaacaaactaa

SEQ ID NO: 2774 - DNA, 966 bp, Clostridium ramosum
gcatataaaatggaaaaaaatctcgaattagctaaacaagcggttttacaaataattgaaaacaatgatgggaatacgtttaagattaatactaaacgttcagataagaatttccctggaagttctcaagaaattaatcgtgaaattgcaggatatgtatttcatcacactacaaaagaaataaaagttgatgtccatgctccagcaattttagtaacagttgaaattcgttatgacgcgatatatgtaatggataatattattaaaggagcaggtgggtatccagttggagttggtggaaaagcattattgatgatgtcaggaggaattgattcaccagtagctggatatttaacattaaaacgtggtgtagatattgagtgcatccattttgctgcaccaccttatactaatgaattggcacgagaaaaagtttttgatttagttgataaattacgtcattatactcacggttcaattagagttcatgtaattaattttacaaaattgcaattagctgtttatgataattgtgacgaaagttatgcaatgacagtcatgagaaggatgatgtatcgtattagtgaaaaaattgctaataaaaataattgtcttgcattagtcaatggtgaaagcattggacaggttgcttcacaaactttaaatagtatgcaggtaatcaatgaagttgttaagattccagtactaagaccagtattatgtcttgataaattagaaattattgatattgctgataggatcgatacttatgaaatttcgattcgccctcatgaagattgctgtactatttttacacctaaagctccggcaactaagcctaagttatataaagcggaaatatttgagtctgggtttgattttgaaactttgattgatgaatgtgtagaaactgctgaaattattacagtcgatcacaattataagaaaaacgacgatattttttaa

SEQ ID NO: 2775 - DNA, 612 bp, Clostridium ramosum
ttatttgtagtaattggccaaattgagggccgacaaaatagtaacgaccagttagtctatagtttttcatcacgagtaacctttattattgaatatcatgatatgcagtggaagattatccatgttcatcaatcagtaccggattatagtcaaggtgatgatgagtttttcccacaacggattgtcgaagaaagtaatgctcagttaaaaaaggaaattgctgaaaagacgaaggaattagagatgtccaatcaacaagtaatctataatttaagacatgattatcttactggaatattaaatcgtccatcacttgaaaaagaagttactgaagcgatgagtaatcatcagtatggagtgatcttagtattagacatagattattttaaagaagttaatgataataatggtcatccgtatggtgatgaggttttgataaaattagctaatacaatgcaagaaagttttaaatcaggaatttgtggtcgcattggcggtgatgaatttatcatttatctggctttagacgatgctaattatgatgcaattgaaaagactattaaagaatttaaacaaaattggcagaagaatattacaacaattgatagaagc

SEQ ID NO: 2776 - DNA, 384 bp, Clostridium ramosum
aatgaattaacgacaagagtgaaggcattgttgcgtcgatattatgtttatcaagggaaaatggaaaaagaagaaaataatgatgacaacattgtttacaataatattactattaatcctaatagtgaagcagtgtatctaaacggagaacaaattgaattaacttacttagaataccaaattctttatcttttattaagtaatcgtaaaagaattttttcaacgcaaacattgtatgagagtatttggaatgaaccttattattatagtgctaataacacaattatggttcatattcgaaatcttcgtaaaaaaatagagagtgatcctcaaaatccaaaaataattaaaacaatttggggtaagggttatcgttgtgattaa

SEQ ID NO: 2777 - DNA, 507 bp, Clostridium ramosum
gcaaatcctgacattgtctatgttgttgaagtctatgatgaatcaaataatcttttatatagtactaaattgactacaaatagtggtacgattgattatgccccaaccggtaaagtaaaggttgttggatattatgcatattcaagcggtagtccaacatctaataaaatcgaaaaaacaattggttcaagtgctaaattagataaagtaaattattcaattacttccggtggttcttctgttactaatggttcgaccacagcaaccagttcagttgcaattaaagtaaacgctcaaagcagtagtaatacgattacgattcaatttatgaattcttcaggaggaacaattggttcacctagtacctttacaggtagtgcaactaaagaattcgcattaacaccaggtgctcaatataccgttaaaatcactgaaagtgatggtactaatacagttagtgcttcaatcagttttactgttggtggtaattcaaaccctggagaataa

SEQ ID NO: 2778 - DNA, 792 bp, Clostridium ramosum
atggcttttgcaacaaaaaatttagttcggccagccgggattttatcaggcggatttatgggaatcgcaataatgatcgatatgattgctgaactaatcgggcacaatatacctacttcaattggcttattgtgtttaaatatcccagtagctttattttgtgcaaaaaaaatatcaccacgatttgttttcttttcgcttttgcaggttggtctgacatcgttgtttttaccattgatgccacaagttccattatttgatgacaagatattaaatgttatttttggtggatttatgtttggcggaagtattgtaattgctttgaaaggtaatgcttcaagtggtggaaccgattttatagcattgtatgtttccaataagagcggaaaggaaatctggaatcaagtgttcatttttaatacaataatgttgtgtgtatttggatatatttttggttttgaggcagcaggatattcaattttattccaatttatgtcaacaaaaacagtttctaattttcatacccgttataaacgtgtaatgatgcagattttcacaaaaaacaaagatgatgttatggcaatatattgcaaaaagtttcatcatgggattacagctttagatggaatgggtggatattctaagacgccggtttctatgttaacggcaattgtttcaagttatgaggttgatgatgttgttactgctttaaaagaagttgaccccaagataattattaatgtaagtaagtcagaaaaatatgttggtcgtttttacaatgcaccattataa

SEQ ID NO: 2779 - DNA, 948 bp, Clostridium ramosum
acgattattgctaatggtggtgaagtgttatttgagacaaaattagttgatgttaatttagcagatgatcagctagtaaacattgttgttgaaaaaaataatattaaaactacgatggaattagataaattagttctagcaattggtcatagtgctcgagacacttatgaaatgctatatcaaaaaggaataaaaatggagcaaaaatcatttgcggtaggacttcgaattgaacacttgcagtcattcataaatgagcatcaatatggtaaatatgcgaatcatccaagtttaaaagctgctgattataaattagcggtcaaaactagtaatggtcgtggagtatatactttttgtatgtgtccgggaggtaaagttataaactcaagtagtgaggctggtggaatcgttgttaatggaatgagtaatcaagctcgtgatgaagcaaatgctaatagtgcagttctggttactgtgggacctgaagattttgctagttcgcatccattagctggtattacctatcaacgagaattagaacaaaaagcttttgaattaggtggtaaagattatagtgtgccagtcatgagggttgaagattatttaaatgatactctggatttaaaaatggaagaagtaagctgcagtgttcaaccaaatgtgagatatgctaaattaagtcaaatatttagtaatgaggtcaatcttgctttaaaagaaggattacaattaatgaatcataaatttacagggtttacagaaaaagcaatgctttcaggagttgaatctagaagttcagcaccagtacgcttatatcgtgatgaaaattttcaaagtaatattaagggaatcatgccgattggtgaaggcgctgggtatgctggtggaattatgtctagtgcaatagatggtttaaaatgtagtgaatttattttaaaaggggaatag

SEQ ID NO: 2780 - DNA, 543 bp, Clostridium ramosum
ttaacgtatggagttggaaaatttggattaaataaagcatttcgttatgaaaatgagcaaattagtcctataatacatataggtaatgggcgactagatcagttgattggttatgaaagccaaaaagaaaaacttacccaaaataccgaggcatttttagcaggaaaaaaagcaaacaatgttttattatacggtgatagtggaactggtaaatcaagtagtattaaagctttattaaacgaatattataaagatggtctaagaatgatagaagtttataaacatcagtttataaatcttcctagtattattcaagaattacagtcacgtaattataaatttgtattattcatggatgatttatcgtttgaggaatttgaaattgagtataaatacttaaaagcagtcattgaaggcgggttagaaaagaaacctgataatattttgatttatgcaacaagtaatcgccgtcatttagtaaaacaaacatggggtgatcgtcaagatcaggatgaggttaatgtaaatgatgctaaacaagaa

SEQ ID NO: 2781 - DNA, 465 bp, Clostridium ramosum
aaaatggttacatatttatataagtatgaagcgccacatcgtatagtcactaatgctaatattggtacgagaaaaccaatctatagtacggcactaggaaaatgtttgttagcttttcaaagaaaaccagaagttattaaagatattttaaaagaaattgattttaaaccgttaacagaatatacgattactagccctcaaaagtatcttaaagaattaaaaagggttaaaaatataggatatgcggttgattttcaggaagattctatttatcaaatttgtatagcagcacctatttttaatcacaataaaaatgtcgttgctgcaataagctgcacttttttatatgatactaatttaagaattaaagagattggtgaagaaatgaaaaggatagcactgactatttctaaaaagttaggttatatagatgatacaggcaggaggaatattcatggcaagtaa

SEQ ID NO: 2782 - DNA, 1047 bp, Clostridium ramosum
atgaaaaacggaggaatatatatgtttaaatttattgaaccaaaaatacaattagataaaaaacggcaaatctttacaaataagcatctacgagctctaatcatccccttgatcattgaacaattattgatcttattagttgggatagctgatactctaatggttagttatgctggtgaagcagccgtatctggtgtctcactagtcaaccagttgaatacggtcttcattcttgtctttactgcattagcatctggtggtgccgttgttgccagccaatatatcggtaataaaaacaaggaaaatggagtgttagcagctagtcaattagttatgataacaacaataatttcagttattttattagtattatcggttatttttcgagaacaattactaacattattgtttggaaaagtcgctccagatgtaatggatgcctgcttaaaatatttagttatttctgctttttcttttcctgctttagcaatctataacagttgtgccggattgtttagaagtatgtctaaaacaagtgttatcatgtatgtatcaatcatcatgaatattattaatattattggtaatgctattggaatttttattcttcatgcaggtgttgcaggagtcgcatacccttcactaatttctcgagtcgttgcggctttaattttattaattatatcttttaatcagaaaaatattatttatattcgcattaaggatatttttaaatggaatgctcaaatgattaagcgtatcctaaatattgctattcccaacggcattgaaaatggcttatttcaattatctaaagttgctttaagtagtattgtcgcaatgtttggaactagccagattgctgcaaacggggttgcacaaagcttttggtcaatggccgctcttttttgtattgcaatgggaccagcttttatcactgttatcggtcaatgtatgggagccggtgataaagaagcggcggactattatatgaaaaaattattaagaatcacttatattggcgggatcatttggaatattgtattt

SEQ ID NO: 2783 - DNA, 561 bp, Clostridium ramosum
tatggcctagttaagaatataattcctgaattcattgaaaatcggcaaactaatgaatcgttagaagaccgctgtttattaattacgctgggaaatgttcgctatgatctagaaaaagttagaatgcttgttttagtaataaccatagcagcgattattttgatgtgtacaactatttatactttagataccccattgattagtatggttacgttgatgtcatattttagtgtcatggtattgttatcgattacaactatttttaaagtaggaatggaattgcaaggacgaaaaaggagctttcttaacttgtatcatatggggtatgatctaaaagatttaaaaaagataatcgatttggaaatgattatcttctatggtttaattattgttattcctttgttgtatcaaataattattttaattaaattgtatagtttaggattgattaatttttatctagtggggggattgttattgattcaaattatcccaatgctagtttgtatgattatttgtacgctcatgtaccaaaaagttttgccggaaccgattatttga

SEQ ID NO: 2784 - DNA, 606 bp, Clostridium ramosum
atgacaaaagctaaaagaatttttggtgtgatttttgcatcaatattactattaatgtccgttgttgttatatccttatatgataatgttagagaaaatacccctcgtgatgataatttaacgggaattttagaagatgatctacagctttttactattgcgatggctaagacccttgattctaattttgaagcagtaagctttgatgatagtgttgatgaacagacaagacaaatatttttagatgtttttgacgattatttaaagggaataacatcattgtttaataatgatggagattttatttataaagctgttaatactaatactaatcaaatgatttcgcaacatagtgaaaaaattacaactaatgatgatcaaagtaaatatagtttctatactgaggcgagctatgatcaaaatggtctagtttcatgtaatggggatttaagtagtgataaactatcatattttaatattgctaaccttttaagctcatttgcacattatgatggtgaaaatactatatatattgacaactggatgtttgatacaaatgcaatcaagattaatgttcctaagaatcttcaaattacatatattatt

SEQ ID NO: 2785 - DNA, 573 bp, Clostridium ramosum
ttgattgatactggttttcctgagacgaagataattaatgaagttcagaaacttactagttttccgcttaaagtactgttaactcatggtgatggagatcattgtgggggacttgatagttttcaagaatgttatgtacatcagggagataagggtttaattaaaacaacaataaaaattaattgtttaaaagaaaaggatttgattgaaattggtgattactgttttgaggtaattgagatacctggacatacttatggaagtattgcatttttagatattcagaagaaattattaattgttggtgatattgtacaattaggaccgatttatatgtttggtgagcatcgaaatttagatttgtatattcatagcttagaaaaattaaatacatatcaaaatcaaattgaaacaattttgcctagtcataatcgttatccattaactaaggagtatattggtcattgtctatcagatgctagattgttaaaggcacataaacttttaggtgttaaacatcaatttttaccatgtcgggaatatcgtggtaaaaaaatttcgttctattattag

SEQ ID NO: 2786 - DNA, 831 bp, Clostridium ramosum
atgaaagatatattaaaacaattaaatacgcgacctaaattatttgaacaaagtacagcaagtatttgggacgaccctcatatttcaaaaggcatgttaaaagctcatcttaacgagaaccaagaatcagctacccgtaaacttgactttgtaaaaaaatcagttgcctggatcaatactgtactacctaatcatcattataacaacttacttgatcttggttgtggccccggtatttatgctgaattattctatcagtatggttatcaggttactggtatcgatctatcaaaacggtcaatcagttatgctcaggcttccgccaaacaaaaaggatttgatattatttaccttcgtagtgactataccaaatcgaactttagacagcactatgatttagttactttaatttattgtgattttggtgtccttcctcctgctactaggaaaaagctcttgcaaaagatctataacacattatcccccaaaggcgctttattatttgatgtctttactcctttacaatatgatggagcggtagaacataaaaattggcaaataaatgaaaatggtttttggcataatgactggcacttagttttaaatgctttttatcgttacgataatgtccatacatttttaaatcagtatactgtcattaatgaagatagaataactacttataatatctgggaacatactttttccctgaaagaattagagaaagacttaaaaaatgccggctttactaaacttgatttttataaagatgtcattggacaaaaatatgataaaacaagtaaaactatttgtgtaattgcccaaaaataa

SEQ ID NO: 2787 - DNA, 690 bp, Clostridium ramosum
cgcttagaaaaagctgccaatcaattaaaaaatacggaaaaaagaatcttagatattgcaatagcctgtggtttttctggacatagtgcttttactcgggcttttaaagaagtctataaaattacaccagatgattatcgtaatcaaaaaattcatttagatcatttcattaaaccagatttacagcttaattatgttgtaattgatactggcgtgccattgatcgtagaagggatggttttagagataaatgaaaaacaagtttgtaatgatcgaattttttatggtaaaagcaaaatggctaaagtagatgaattaggtgaaccgaagataaataacatagtttctttgtaccaggaattagatgttcaagatgcggtagtagtagatattttaacattgagtgatgatcctgccttatttaattattttgtagggattgaaattgatagaccgtcaattgattgtgaacaacgaattattcctagtggtaagtatgtagtatgtagttatgaagcagaaaattttgaatcattagtgaatgaagctttatataaggctagccgatatttgtatgaagtttggtttgttgaacatcgtcttgaaccagatgatcttctggttcaaaaatattataatccttatcaggaaaattgttatattgaactttgggctaaagtacgatcataa

SEQ ID NO: 2788 - DNA, 522 bp, Clostridium ramosum
aatggacgcgaatattcgatcaattatgttaatcaggataatgttcaaatagccacaacaaaagttatgacagcgccacttggcagtacagtgaacgagagagctaaaacgattgctggctatgaattgattggagctgctgatttatcaattacaattggtgaaacagataattcaatcacatatgtatatcgagatttaaatgtaacacaggaatatgttgaaagtgttgtagtgattcctgtaggtttacctgctaacactgcagtatcaactgcaactggtggagcaggaactggtggcactacaactaaccaaggtgatgataccgaaaatgtgactgattcagaaactccgttatcacctggggatggaacagaggaagttcctgatgatcagacgcctttaaaaaaaggtgaagaaggaattaattatacttatttgtatattacaggtggaattgttttactgttaattgctgctggtatctttattcttaaaaggaaacaagcaagtgaataa

SEQ ID NO: 2789 - DNA, 525 bp, Clostridium ramosum
gtgtatcgtctattagagctcggctgtggaaatggtaaattatgggagaacaatacatataatcttcgtaatcgagaaatcttcttatcagataattctgagggaatgatagatgaaattcgtcaaaaacttggaaatgattataattatattgttgcagactgccaaagtattccttttaaaaataactactttgatacaattgttgctaatcacatgcttttttatttaaaggatttaaaacaaggtttaactgaaataactcgtgtcttaaagaataatggtactttttattgcacgacctacagtaaatatcatatgcaggaaattagcgaacttgctcaaaactttgactcacgtatctctttatctgatgatcctcttcctgaacgtttcggtcttgaaaatggtaaagatattttaaaaagctattttaattatgtggaattaaaaaaatatgaagattatttgttaataactgaagcccaaccacttatcgattatattcttagttgtcatggtaat

SEQ ID NO: 2790 - DNA, 585 bp, Clostridium ramosum
aaagaagttgcttatttcaaatcactagattctaaattagtggacggaatcatctgcatttcaggaattgaaacaatcccatcagattcattaactcgtgacatcccaattgtttgtattgatcgaaaacccaaagatcatagtaatgcctactatgttgaatctaatcactatttagggggatatttagcaactgaagaactaattcaacaagggtgtaaaaatattgcaatcgtatcacgaaataagtcattatctgtcaacaagcagcgtttaatgggctatcgtcaagctttaaaagattatcaattacaagaaaacaaacagctagaattattattggatattgaacaagctaattacgaaggggctaaagaagcaattaatcaattaattaaaaacaatattccttttgatggtgtctttgcaactaatgattggcgtgcttatggggtacttgtaggacttttagaaaacaatgttaaagtccctgatgaagttaagatcattggttttgatgatattttcatttctgcatccagccacccatcactttcaacactcaagcagaacattcctgcttta

SEQ ID NO: 2791 - DNA, 876 bp, Clostridium ramosum
atgtcacaaggaagaattattaaagcattagcagggttttattatgtcgaagatgatcatcaaataattcaatgtcgtgctagggggaaatttcgtaaggatgagattaagcccctggttggtgactttgttgaatatgaagtcgaaggtgataatgatggctatgtaatgaatgtattgcctcgtcataattgtttagttcgaccacctatttgtaatgttgatcaagctctgattgttagttcttgtaaggaacctgatttttcatcaatattattagataaatttcttttagtaattgagcatttaggaattgaaccaattattattatttctaaaatggatttagatgaagataaaagcgttaaacaatatgttaaagattatcgtcaggctggatatcgggtatatgaaataagctcaaaagataatcatgggcttgaggaattaaaaacagtctttaaagataaagtatcagtgattactggacaaagtggggtaggcaaaagtagttttttgaatgccttagatattaatttaaaattggaaacaaatgagatatcaaaatctcttgggcgaggaaaacatacaactcgtcatgttgaactgctcaagatgtatggtggatatcttggagatacacctggtttttcttcattagaattggaaatgacaccggaagaactagctgtagcctatcatgattttgctcaatttagtcatgaatgcaagtttagaggatgtttacacgatagtgaacctaattgtggggtaaaaaaagccgttgaagatggaaaaatatctaaagaacgctatgagcattatttaatgaatttacaagatgtaaaaaagaaagaggaacggaagtatggttaa

SEQ ID NO: 2792 - DNA, 804 bp, Clostridium ramosum
gagatgattatgaaaaaagttctaactatcgcaggaactgatccaacaggtggagcaggagttcaagcggatctaaaaaccatgacagctcataaagtctacgggatgagtattattactgccttagtggcccaaaacacattaggtgttagagatattatggaagtaaaacctgattttttagccgaacagtttgactgtgtctttgaagatatttatcctgatgcaattaaaattggaatggtttccagtccagtattaattgaaatgatcgtaaataaattaacatcacaaaaagattgtcctatcgttgttgatcctgttatggtttctactagcggatctcgtttattagctgacaatgctctaagactcttgaaagaaaagcttattccattagctactattattacccctaatatccctgaagcacaggttttaacaaatttaaaaattaatactaaagatgacatgattacagccgcaaagatgattagtgaatggtaccacggctacattttgatcaaagggggccattttgaagaacgggctgatgaccttctttattaccggggaaatattacttggttgacaggagaaaaaattaataatcctaatactcacggcactggctgtaccctttcttcagcaattgcttccaatctagctttagaatattcaattgaagaaagcgttactagagctaaagtctatattaccggggctttaaaagctaatcttaacctaggtcatggcagtggaccattagatcattgctggaatattaatcaaacattaaaataa

SEQ ID NO: 2793 - DNA, 1533 bp, Clostridium ramosum
caagatagtcaaacagcagtttcgatgttttcaaaagtagttcctgcgggaattttaggatgttatcgtaccaaggaattgccgatttattttattaatcgggaaatgttgagtctacttaaccttactacaatggaagagtttaatcttttttgtaaagggcaaattattaacattattcatcctgaagatcatcaaacagtatatgcagccattggattagaagaagatgaaggatttgaatataccgttcgatatcgaattatgaaaaaagatcagacttggctttgggttcaagaaaaagggcgaatcgttaaagctaaagacggactattagcttatatctgcgcgattgtagatattaatgaaacaatgtcatcaaaaatcgagttagaaaaaattaatcaacagttaataaaacaaaaacaacaactttcatttttaaatgaatgtacgttaggtggatattttcattgtaaaaacaacagccaattagaatttgactatcttagtgaaagttttttaaatattgttggttttagccaagtggaaattattactagctataacaatcaattagtacaattgattcatcctgatgatcgtcataagattactgataaattaacaggtaagagtacatcgattaatttgatgtatcgaattaatagtagtacaggatatatgtgggtaactaatcaattagaacttgttgctcatcaaggaaacctgatttggcgtggaatcgttattaatataaccgaacgtgtagaactaaaaaatcatctggaggcagtagtaaataattcgcctggagatatttttatgatgacacctaatcatattgaattttttagcagtaatttatcaacatcgttaggttattgtaaagaagaatattgtcagctgacaaagcggagctatgatttaattgataaacgtgatattgattacgttaatgaagcatttgaggcagcctatagggaaaaaagaccattagatgttatctaccgtgttcaacataaaaatgggagtattgcttatattcaaatgattgcaagttattatgaagacaaggctggaagaccatatttttatggtgactttattaatattaccgaggtagtaaatgcacgaaaaaataatcagttagttattgataatactatgaccgtagtctttttaattcgtttgagagatgctcctccaaattttgaaaatccagaaataaatatgatttcaatcggtattttagaaaaatatggatatacaaaacaatcgtgtatcgaagcaatgaaaaaaggtggaaactgcggattgatcaataaaaatgattatgcagcaattaaagatgactatatcaaagcggtagataataaagaagattacaatgcgatttatcgatttgaattggaacaaacaacattgtggatggattccaaaacaaaatatttaaatactgaaaatggttatcgaacatatttgtgtgtattaaatgatgtaacatcaatgaaacaaaaagaagaggagatt

SEQ ID NO: 2794 - DNA, 1401 bp, Clostridium ramosum
ggggtattcccttttatttctgcctttgtaatcctatttcaatatattcaccctgaatatattttaacaggtaccgcagccactagtgctcttttaattatttatttgtatttacaaaacaagcaaatgttcacagacacattaacgaatttgttgaatcgtcaagaattcaacaagatgatcgatatcttaatcgataataacaaaccttttattgctgtagttatttctttaaaaaattttaagtttattaatgataaattcggccaagaaataggtgatcaaattcttttagaagtttgtcattatttacgttatttattgcctaagcaggcaatgtatcgctatggcggagatgagtttgcattaattttttataataaaaagaatgtaataaatgctctagaaaagattgaaacacgaatgaaaaatccgtggcagatttcaaatattgactttatcattagttatgtagctggaggaattgcttatcctaaagttgctcatagcaaagaagaaattattaacggcctagaatatgctgtttcgttaggaaaaaaggataatgctcataatattaatttttgtgttactgcaatgatcaaacaaattagacgaaaatatcaaattcttgacttattaagaatttgtttagaaaacaatagttttgaagtttattttcaacctatctatgatctcaaaacacatagctattgcaaggcagaggcattactccgtttaccggacaatccacttgggtttatttctcccgaggaatttattccaatcgctgaagaaaatgggttgattgctccaattacttatcaggtacttgataaaacttgtctttttataaaaaaagtgattgctgaaaaaaaggattttaccggtgtttctattaatttttcagtattacaatttatgcaagatgatcttgaaaataaagttttaaaagttattgaaaaacatcaactgccttatgaattaataaaaattgaaattaccgaaagtatgctggtaactaattttgatgcaatcacaaattttatgacaaatatgattaatcgtggaatccaattcttactagatgattttggtactggttattctaatatcacctatgtccttactatcccctttcaagtcgttaaagtagataaaagcctaatctggcaagcaatgaaagatgagaaagctgcaattcttattaaaaaaatgattgaagcatttaatcaaattggtttacatatcttagctgaaggaatcgagacgaaggagcaaatggaatttatgaaaaaatgcggctgtgatttattgcaaggttattatttttctcgaccagtcccatttgatgaagctttaaatgtaatcaaaacaactaaaattaccgaaaaagaataa

SEQ ID NO: 2795 - DNA, 510 bp, Clostridium ramosum
atggagagaatgatgaaaaaatcaagttatgaattattaggacaggatcctaaatgggtcaaaaaactgttatttgcgggtgtgtttattcaggagaataagttacatgcgatatttgatcgttacaatgaaatgacaagtaaacaatggttattaatggctacgatgacttcatttactgatgctcctgatttaagcatgttagcaaaagtgatggggtgttcacgacaaaatgtaaaaaaattagcactgagtttggaaaagcagggatatgtgattttagagaagtcacccaaagatgcacgttcgttatgtgtggtaatgagtaaacagggattgcgctttagaaaagatatggaagaattaacagatgaggtacatcaagctttatttagtgaatttagtaatgaagaaatcactcagtattatcagttatcaattaaattaatgcatgggatcgatcatttagaagtattttttaaaaatcgtcaaaagggggcagaaggatga

SEQ ID NO: 2796 - DNA, 855 bp, Clostridium ramosum
atgaaagatatcagaaatataatcggaatattattaggtaatacaatttatgctttaggagtaacgatgtttattttacctaataatttaattacaggtggaacaacagggatggcgttgttagtaaatgcgacgactggattttcaataactgtctttgtttcaatttttaatgtcagtatgtttttaattgggtggaaagtattagggaaaaagtttgctttaacgactttgatcagttctttttactatccattcattttagggattcttcaaggtgtttttaaaaatgaaatgatgagtaaagatacattattatgcgttattttagcgggattaatgatgggtacagcaatcggggtagtaattcgttgtggagctagtactggaggaatggatataccgccattgatcctaaataaaaaattaggtattcctatttcagtaagtatgtatggttttgattttattattttactaggacaaatggtcattcgtaatcgagaaatggttttttatggaatcttgctagtgctgatctatactgttgtcttagataaagtattggttattggaaaatcacagatgcaagtcaaaatagttagcgctaaatttaatgagataaatgaaaagattattagtgttcttgatcggggaactacactgattcatagtgagacgggttttaagcataatcagtacccagtagttttaacagttgtaaataatcgagagttgacccagttaaataattatgtttatgacatcgatcctgatgcctttatgattatcaataaggtaaatgaggttaggggaaaaggcttctcaagtgcaaaaaaatatgaaaataaataa

SEQ ID NO: 2797 - DNA, 429 bp, Clostridium ramosum
ttgttaggaggaatggaaatgggtttattagacgtaaagaatttatcgtttaaatatgataatcagattgaaaaggtatttgataatgttagttttcaaattgatacaaattggaaacttggattgattggtcgaaatggtaaagggaagactacgttgttagaattattgatgtctaaatatgaatatcggggctatattacccctaattatatctttgactattttccgtatcatattgaaaatgaaaatattaggactttaaaaattgttgagaatattcttggtgaatttgaattatgggaagtacaaagagaattatcattacttgatgtggaaaatgaggttttagaacaaaatttcgctaccttatcaaaaggacaacaaactaaagtattattggccattcttttttgcaagcctcatgat

SEQ ID NO: 2798 - DNA, 678 bp, Clostridium ramosum
atgaaatttgaggataaattaaaagcacggagtcgagaagatgtttggaatgaatactgtggctttttagatttatcgatggatgaatttgttcagattcaaaatcgtctgatggaagaacaaattgccttatggtcacgaagcccattagggaaaaaaatattaaaaggaagtacaccaaaaaatattaaggagtttcgtggactagttccattaacttcttatgatgattatgctagcgacttattacaaaagaaaagcgaacttttaccagatgaaccggttttatggatccagacaacttgggagggtggtaaacatcccatcaaggtggctccttatactgaaagtatgctggatacatttaaacgaaatgtctgtgcctgtttgttattgggaacttcaacaaagcgaggggattttaaagcccgttcgacagatacgattttatatggtctagcaccattaccttatgcaacaggcttgttaccattagcatttgaagaggaaatcggtattgaatttttaccgcctgttaaggatgctgtgaaaatgagtttttcaactcgaaataaagtaggatttaaattaggattgtcaaagggaattgactatttttttggtttaggaagtgtaacttattatgttagtttaagtttaggaaaaatgagttctggt

SEQ ID NO: 2799 - DNA, 357 bp, Clostridium ramosum
atgtcatcaacccttgccaatagaatgcgacctcaaaatttaaaagatataatcggacaacaacatttagttggaccaaatgctattttaactaaatttgttcaaaaaagtcatccattttcaattattttatacggtagccccggctgtggcaaaacaacaattgcaatggcccttgcaaatgatcttgacattccatatcgcatcttcaacgcttcaaccggaaataaaaaagaaatggatgcaattattgaagaagctaagttaagtggtagtctttttgtaatcattgatgaagttcatcgacttaataaagcgcgccaagatgatcttctttcacacatggaaagtggatta

SEQ ID NO: 2800 - DNA, 552 bp, Clostridium ramosum
atgtcaattatatgtgtaactatttttttaactaatatcaatagtgggattaataaaaaagttcaagaaattttacttaacgaagtgatttctcatcgcaaaagtttggaagcgacgatctctatacaatatcaagaattagaagggatatctgagtatatcactagcttaaacacacgtgatatgtcacaattgataaattttactaaagcatttgtttctaaaaatggatttgatcgaattgttgtggcgtttgaagatggaattggatatctaagtgatggtagtagttatgatataagtactagaggatattatcaagatacgatgaatggaggagctagaaatagtgaaccagtagattcagttattgatggtgagcgtaggatggctttatctgttccaatttatagtcaacatggtcaagtaatcggtatggtaatgggatcttatgatgtacgggcaattagtgaaattgagttttctaatttatataataacaagggttatacttatttaattgattattctggtaattttttgattaatcat

SEQ ID NO: 2801 - DNA, 870 bp, Unknown
  Unknown gut bacteria
ttggatttgatatggcagaaattcaccgaatggctgaaggagctgctggtcagcggcatcatggacaacgtgaacggactgtttgacaacgtgaacagccgcgtggcgggcatcgccggacaggtgggcgctacgccccagggctggaacagcagtatctacggcatgatccgaacgctgtcggacaatgtgattttgcccatcgcgggcgtgatcctggcctttgtcatgacgctggagctcatccagctcattacggaaaagaacaatatgcacgacgtggacacatggatgttcttcaaatggatattcaagaccgcctgcgccgtgctcatcgtcaccaacacatggaacatcgtcatgggcgtgtttgaagcggctcagagcgtcgtcaacagcgcgtcgggcatcatcatatcggacacgtccctgacgttcaacgagcatatcgcgggatttgaagcaaagctcctggatatggaggtctggtcgctgctggggctgtggctggagtccgtggtcgtgcatctttccatgtgggcgctgaccatctgcatcttcatcatctgctacggcagaatgatcgagatctactgcgtgacctccatcgcgcccatccccatggcgaccatggccaaccgggaatgggggcagatgggccagaattaccttagaagcctgctggcgctgggctttcagggcttcctcatcatcgtctgcgtggcgatctacgcggtgctgatccagaacatcgtggtggagagcagcgtctcggcggccatatggacgtgcatggggtatacggtgctgctgtgcttcacgctgtttaagacgagctcccttgccaggagcctgttccacgcccactga

SEQ ID NO: 2802 - DNA, 1458 bp, Unknown
  Unknown gut bacteria
atgtaccccgacggcgtgtgccgcgtgacggacaattactacacgaaaaccgtgcagtttcaggatatcaactatcagctcaaccagaacgaggacaagaccgccattttcgacggctggtgcgacttcctcaactatttcgattcctccatccgcttccagctctcctttatcaacctctccgccacgcgggacacctacgcccggcgcatcgccatccccttgcagggcgactgcttcgacaagctccgcaccgagtacaccgggatgctgcaaagccagctcgccagaggcaacaacgggctgattaagaccaaatacctgaccttcggcgtggaggcggacagcctgaaagccgcaaagccccgattggagcgcatcgagacggatatcctcaacaacttccgccgtctgggcgtgacggcggagagcctgaacgggatggagcgcctgcgtctgctgcacgggatgctccacatggacgagccgcagcccttccgcttctcgtgggactggctggctccctccgggctgtcggtgaaggacttcatcgccccaagcgccttcgagttcaagaccggcagcagcttcggcgtgggcagcaagaccggctgtgtatccttcttgcagattttagcgccggagctcaacgaccggatgctggcggattttctcgatatggaaagctccctcatcgtcagtatgcacgtccagtccgtggatcaggtgaaggccatcaagaccatcaagcgccagatcaccgatttgcagaagatgaccattgaggagcagaaaaaggcggtgcgctccggctacgatatggatattatcccctccgaccttgccacttacggcacggaggcgaaaaagctcttgcaggagctgcaaagccgcaacgagcgtatgttccttttgaccttccttgtggtgaacgtggcggacaacaggcagcgcctcggcaacaacgtctttcaggcgggctccatcgcccagaagtacaactgccaactcacgcggctggactttcagcaggaggagggcttcatgagcagcctccccttggggctgaaccagatcgagatccagcgggggctgaccacctccagcgtggcgatcttcgtgccgtttaccacccaggagctgtttcaggacggcaaggaagccctctactgcgggctgaacgccctttccaacaacctcatcatggtagacagaaagctgcttaaaaacccaaacgggctgatcttaggcacgcccggaagcggcaagtccttctccgccaagcgggagatcgccaacgtgttcctcgtcaccaatgacgatatcatcatctgtgacccggaggcggagtacgggccgctggtggagcacctgcacgggcaggtggtgaagatctcgcccacctccaccgactacctgaaccccatggatttgaacctgaattacagcgacgatgaa

SEQ ID NO: 2803 - DNA, 2184 bp, Unknown
  Unknown gut bacteria
atgtatgaaatggctgaaaaacagaccaacaaggaacggctcaaggacatcaccgacagcattgagacgggcataaaggagctgtttgagagcgacagatacaggcagtaccttgccaccatgagccgctttcaccgctacagcgtcaacaacaccatgctcatctatatgcagcgccccgatgccacccatgtggctggcttcaacaaatggcgcgatcagttcggaagaagcgtcaaaaagggcgaaaagggcattaaaatcatcgcccccacgcccttcaagaagaaaatcgagcagcagaaattagaccccgacaccaagctccccctgcgggacgagaacggcgatattatcacggaggaaaagacggtgcagatccccatgtacaagcccgtggtggtgttcgacgtgcagcagaccgcaggcaagcccctgccggagctggcggcgaaccttacgggggacgtgcagaattacgaggtgtttatggaagctctgcgccgcagcgcgcccgtccccatcttctttgagaagctggcggagaatatggacggttacttctccgtggacaaacagcgcatcgtcctcagagaaggcatgagcgaggtacagacggtctgcgccgccgtccatgagatcgcccactccaggctccacaataaggacgaaatcggagaaaaatatcaggcggtcgagctgttcggcaagcccgcgctgttctccaacgggcgcatcgaccgggataagctgccggagggcttgtatgcgtatgacctgcgcggctcggattacgatccgggtatgccggtaacgcttgaaagccatgtcaccgtcaatcatgccgcctctgtcatcacagcagcgcccattgagctgccggagcagggctttctttatttaggcgaggacgggctgaacttcacaggcggcgagcagaccgtgaaggagtttctgcacgcacagtacccggaaaaggcaaagctctctcgcgccgccgaggagattcaggcggagagcatttccttcgccgtctgcgcctattacggcattgagacaggcgaaaacagcttcgggtatctggcaacctgggcaaaggacagagagctgaccgagcttcgcgcatcgctggagaccatcaaccgaacctcatcctccctgattacggatatcgaccgccattacgcggaaatatgcaaggagcgcgggctggacagggagacggagagccttgccgcccagcctgtgcaggagatcgccgtgcaggagcaggagccggtcacagcgccggacaacggctgcgtccccgatcctgcaatttctgttgagagcatgaacgcctacggctacaccgattccaatatgctgccgctgacaaaggagcgtgcgctggagctcatggaacgggatgtaagcgtgtatatgcttcacacggacaacaccgaggccatggccttcgatgcagaggatatccgcagctttgacggtatcttcggcgtggaactctccgaatgggagacggtcaaagaccgccttgcgccgccggactatgaaaaggcgttcctcgacaacaccgccgacagctttataatctatcagcttcgggataatgataatacggcgcagctccgctttatgaacgccgagtatctggagaagaaggggctttccattgaaaagggaaattacgccgccgtctacgcgggcagcctcgaccgcaggggcgatacgcaggacaggttggacgagctgtatgaaaccttcaacctccgccgcccggaggattttcgcggccacagcttgtccgtcagcgacatcgtggcgctgaagcagaacggcgtggtatcctgtcattacgtggattcccggggcttcaaggcgctgccagacttcctaaagccggaaaactatctcaaaaacgcggagatggccctggaggacgactacggcatgatcgacggcgtcatcaacaacgggccgaagcagaccgtcgcggagctggaggaacagtccaagaccggcacacccatttctctgctggagctggcacaggcggcgcgccgggaacaggcgcaagcggcacggcaggagaagaagccctccgtgctggcaaagctctgtcctcccgtcaacgagccgaaaaagacagcgcgttcaaagcgcgcggaaagagagctgctatga

SEQ ID NO: 2804 - DNA, 1011 bp, Unknown
  Unknown gut bacteria
atgccgagcaagctacaaacgtatatgcagatggcggacgaggcgcagcggcaaatcaccggcagctaccggggctggacgggctttctcaccaccgccgcaaggctgtacaaatacccctacgccgagcaggtcatgatccacgcccagcgtccggacgccaccgcctgcgcggagtacgacttctggaacgaaaagatgggccggtatgtccgcaggggctccaagggcatcgccctcatcgacagcagcggcgaaaggccgaggcttcggtatgtgttcgacgtgtcggacacgggcggcagggagtttcccaagagccgctatctgtgggaatatcgggaggaacacgcgggcgcggtaagcgccatgctggaaagccgctacggtgcggacggaaaaggagggcttcccgaccagcttgagcgcatcgcgtctcagcttgcggaggaatactggcgggactataagcgggatatcctcgccatcgttgacgattcctttctttacgggtatgatgagttcaacgtaggagcggccttccaaagcgccgccgccgtcagcatcgcctactcgctcatgtcccgctgcgggcttgaagcggacgaccgcttcgagcatgaggatttcctgagcatcttcgatttcaacaccccggaagccgccgccgagctgggcacggcggtgagcaggatcaacggagaggtgctgcggcagatcgaagtcaccatcaataattacgagcgcgagaaactcgcggaaaggagccatggccatgacagagctgacctacaccaagaacggggactacctgattcccgacctgacgctgagcgaaacgccggaggacgcgagacccctgggcaagtacgggagactgcgcaggagctaccttcaggagcacagaccggggctgtacagccgtctggtgctgtcggagaagctgttcccgcatctgcgggagatcgacgagacggcgaatcggagattggagcagatgatgccggagct

SEQ ID NO: 2805 - DNA, 561 bp, Unknown
  Unknown gut bacteria
gaggcggagtacgggccgctggtggagcacctgcacgggcaggtggtgaagatctcgcctacctccaccgactacctgaaccccatggatttgaacctgaattacagcgacgatgaaaacccgctgagcctgaaatccgacttcatcctctccatgtgcgagctgatcgtgggcggcaaggacggcctcatgccggtggacaagaccatcatcgaccgctgcgtgcgctctgtttaccgggaatacctgagcgacccccgcccggaaaagatgccgattttagaggacttgtacaacgagcttcgcaggcaggatgaaaaggaagcgcaatatatcgccacggcgctggaaatctacgtcaccggctcactcaacgtgttcaaccaccgcagcaacgtgaatatcgaaaaccgcgtggtcagcttcgatatcaaggagctgggcaagcagctcaaaaagatcgggatgctggtggtgcaggacgcggtgtggaaccgcgtcacgatcaaccgggagcagcgcaagtccacccgctactatatcgacgaaatgcaccttctt

SEQ ID NO: 2806 - DNA, 1407 bp, Unknown
  Unknown gut bacteria
atggcgaccacacgaatcatacccatgcacttaaacaagggcaagacgctggcgcagtgccttgccgaccggacggagtacggcatgaacccggataagactgagggaggtgcgctgatctccgcattcgcctgcgagccggagaccgccgtttccgaatttgccctgtccaagcgggagtaccgggagctgaccggacgggtgcaggaaagcgacgtcatcgcctatcaggtacggcagtcctttaagcccggagaggttacgccggaggaggccaaccgcataggatatgaatttgccaaacgcttcctaaagggccggcacgcttttctcgtctgcacccacaccgacaaaaagcacattcataaccacatctactggaactccacggcgctggactgtacgaaaaagttcaagaacttcatcgggagctaccgcgctgtccgcaggctgtccgacctgatctgcgccgagcaccggctgtccgtggttgagaatccacagaaacacgggctgagctacaacaaatggcgcggcggtcacgacaagctctccaaccgcgagcttctgcgcatggcgatagacgcggcgcttgaaaagcagcccaaggacttcgacgtacttttagcccttttgaaatcctccggctattccgttgcccgaaagggcaggctgtcgctgcggcacgaaaaccagaaacagagcatccgtctggattctctgggcgagggatattccgagcaggagctgcgcgccgtccttgcgggaagcaggacgcacaagccctttgtcaggaaaaaatatccgcagcgcagggagcgcgccacgctgatttccgacattgaggcgaagctcaacgcaggaaaaggctaccgctacgatcaggcgatgaaggtggtaaagctcaagcagatggcaaagacgctgatatatctggaggaaaagggctttgccgatttcgacgcacttgccgacgccgccgccgatgcggagaagcgattctatgatttgagggcggccataaagacggcggaagcgcgtatgagcgagatacagaccctgcggacgcacatcatgaactattcgaggacgcgcagcgtttacaccggctaccgcaaggcggggtactcgaaaaaataccttgcggagcatgaggggaatatcctcatccacaaggcggcgaagaaagcctttgatgcgttcggcctgaaaaagctgcccacggtcaggagcctgaacgaggaatttgcaaggctgctggcagagaaaaaggcggcctacgccgagtaccaccgggcgcaggagcagatgcgggagctgctgatccacaaggcgaacgccgcctatctgctggggctgaacgaacagaaccggcagaccaccgagcggcagcgcgaggaaaaatag

SEQ ID NO: 2807 - DNA, 372 bp, Unknown
  Unknown gut bacteria
ttacccaaagtggcgcttgggtcggcaggcgcgctatttttatgcccagatgcgggcgaaggaggtgttattgtgaaagcatatgggaagtcgtggggctacaacgtatatgactgccggtactgcctgtaccggaaagggaagctcaagggctgcgtctacccggacggctgctgctgtcccgtcccgcagaagcccgcaagacggaacggcatagaacaagtttacgaagcagctgcggacagagccgctcccgtttcggagtgcgagggctgtccctacggaagggctgccccctgcatcggatggtgtaccaaagaggtcatgcgcgccgcagggcttccaaaggagcgtgacagaagccatgtatga

SEQ ID NO: 2808 - DNA, 360 bp, Unknown
  Unknown gut bacteria
atgacagagctgacctacaccaagaacggggactacctgattcccgacctgacgctgagcgagacgccggaggacgcgagacccctgggcaagtacgggagactgcgcaggagctaccttcaggagcacagaccggggctgtacagccgtctggtgctgtcggagaagctgttcccgcacctgcgggagatcgacgagacggcgaacctgaggctggagcagatgatgccggagctgatgaagtcggcgggcgtgacggaggagctgaaagcccgcgaccagataaaatgggtggggctgatgaaccgcctgaaagcgcaggccgatgagatcatcctcagcgagctggtgtacaactga

SEQ ID NO: 2809 - DNA, 306 bp, Unknown
  Unknown gut bacteria
ttggcagattaccttaacaacaaccatatcaacgcaaaaaaggaggatgttatgaacccgcgacttgaaaagctgcgtcaggagcgcgagaagctggcggaaaagctcacatcgctgaccgcacggctcaaagccctggacgagcagattctgaagctggaaaacacggatattgtgggaatcgtccgcgagaatggactgaccatcgagcagctcgcggcgctgatggcgatgctggagaagcgtcccacggcggcgctgcccgacgaatacagaaaaacggaggaatttgtggatgaagaataa

SEQ ID NO: 2810 - DNA, 279 bp, Unknown
  Unknown gut bacteria
atgagaaaagcaagcgctccccgtaagctctcgccggatgtgtcacgcaggctgtccgattcccgcaggcaatccgccgcgctgacactccgggagatccactgccccttttgcagctttctggtggagaaggtgttctccgacgcagcgggacacaaaatggtctactgccgaaaatgcaagtcggagtatcccatcaatctgggctgcttccgcaggatgaaggcgaaacaggccgtctgccgcctgctttccggaaaaccgaggcagaaacgataa

SEQ ID NO: 2811 - DNA, 960 bp, Unknown
  Unknown gut bacteria
gtgacagaagccatgtatgactatttctacggcgcggaagcggaacagttctccttttaccgcatccccaaggtgctgttcacggaggagcggttcagaagcgtttccgcagaagccaaggtgctctacggtctgctccttgaccgtatgagcctgagctgcaagaacggctggctggataaagaaggacgtgtgtatatcatcttcaccatcgaggaggtcatgaccgccctgagctgcgccgaccagaaggccggaaagctgctgcatgagctggagagcaaatgccgcctcatcgagcgcaagcggcaggggctgggcaagcccaacctcatctacgtcaagaattttgtggataaagctgcggataactctgtagataacccatcgggcagcaccgcgccctccccggaatcacgattccagaaccgtgaaaatcacgattcaggagcagtgaaaatcacggatcaagaaccgttaaaatcacgatctaataatactgagaataatgatactgattttagtgatactgattcctttcccttcacttcgttcaggagggatcacgggcgggaagcgaaaggaaacgaagcggctctgagagagcggtacagagagcttattgcggagaacatcgcctacgacgcactcctgacagactatccatacgagcaggacacgctggaagaaatcctggagctgctggtggatgtggtctgcacgacgaaaagctccgtccgcatttccggcgacgataagcccgccgaggtggtcaggagccagtttttgaagctgaacagcgagcacatccgctttgtggtgggcgggctgaaggaaaacaccacccgcatccgcaatatgcgccagtatcttttagccacgctgtataacgcccctctgaccatcgggaactactaccgaagccttgtcagtcacgatatgtcggagggattcatctga

SEQ ID NO: 2812 - DNA, 615 bp, Unknown
  Unknown gut bacteria
atgaaggaatttgacgtgaccatcaccgaaacactgaagctcaccgtgtccgtggaggcttcttccaaagaggaagcccaacagatggtaagcgaccagtggcacgccggggatcatattctggatgcggacaatttcgtggaggtggagtttgagagcaatgacggcaaggaaatctccgccgaaagagcgcaggacgacaccatcgaggtgctcatggtggagccgggacagtacccgcgcgtggagcgtatcggctccgaccttgcctccttgcagaaggcggtggacggctatatcgaggcggtctacccatatgacgaccccgtggcgctgatctgcggggaggaagccaagctggagggcaagcccctgaaccgcgccctgcgggacggggacggcgatatctacgatattgtggccggtaagtttttcatctgcggtctgggggatgagaactttgcgtctctgccgaaggagctgcaacagaaatatgaggaaaagttccgtcagccggaagcctttttgaagatgggcagcaaaattatgccgatccccaccgagcccgccaaggctgcgggcaagggcaagaccgctccggtgacagaacgatga

SEQ ID NO: 2813 - DNA, 1497 bp, Unknown
  Unknown gut bacteria
atgaagaaacctctgaatatcaagaagttcctgctgcccaatatcccgtatgtctttattgccctctttgccaccaagctggggcaggcgtggaggcttgcccccggcacggacttctcgggaaaggcgctgcacctcatggagggcttcgccgccgcgttccaatcggcgctgcccagcttccaccccatcgacctgtgcgtgggcgttgcagccgctctgctcattcggcttatcgtgtacgtcaagggcaaaaacgccaagaaattccgcaaaaatctggaatacggctctgcccgttggggcaggcccgaggatatcgccccttacgtcgatccgaagtttgagaacaacgtcattctcacccagaccgagcggctcatgatgtccaaccgccccaaagaccccaagacggcgcggaacaaaaacgtgctggtggtgggcggctcaggcagcggcaagacgaggtttttcattaaaccaaatctcatgcaattacacagttcatacgttgtcaccgacccgaagggcagcatcgccgtggagtgcggaaagctcatgctccgcaatggctataaggtgaagatattcaattccatcaacttcaagaagtcccaccattacaacccctttgcgtatatccacagtgagaaggatattttgaagctggtcacgaccctcattgccaacaccaagggggacgggaaatccggagacgacttctggcagaaggccgagacgctgctctacacggcgctcatcggctatatccactacgaagcccccgaggaggaacagaacttcgccacactcatcgagttcatcaacgccatggaggtgcgcgaggacgatgagacctttgagaacaacgtggatctggccttcaaggagctggcaagccgggagccgaatcactttgccgtgcggcaatataaaaaatacaaattagcggcgggcaaaacagccaagtcgatcaatatttcctgcggcgcgcgccttgcgcccttcgatatccaggagctgcgggagatcaccatgtacgacgagctggagctggacactctgggcgaccggaaaacggcgctgtttctcatcatgagcgacaccgacagcaccttcaacttcctcatttccatgatttacagccagttattcaacctgctgtgtgaaaaggccgacgacgtgtacggcggcaggctccccgtccatgtgcgctgcctcatcgacgagtgcgccaacatcgggcagataccgaaccttgaaaagctcatggctaccatccgcagccgtgagatctccgcctgtctcgtcttgcaagcccaaagccagctaaaggctttgtacaaggacaacgccgacaccattatcggcaactgcgacagctccatctttttgggcggcaaggagcccggcacgctgaaggagctgaatcaggcgctggggaaagagaccatcgacaccgtgcgcccagatagggcgttgagcaaagtagtgtaa

SEQ ID NO: 2814 - DNA, 486 bp, Unknown
  Unknown gut bacteria
atgaacgcacaggacagatacaacagcgagagatatccggacatgacctgctttctcgctttgaggaatatcgaaagaaacgaaagaaaggaacggagaaaccgcatgaaggaaaactggatttaccgcaggggcgacgtgtatttggccaacctcgacccctacataggctccgagcagggcggcacccgccctgtggtcgtcctgcaaaacaacaccggcaactactactgccccacgctgatcgtcgcgcccatcacgtccaagtccggcaagaagccgtcccagcccacccactactacgccgagcgcatccacgggctggagcttcccggcatggtgctgctggagcagatcaagaccatcgacaagcggcgcgtgaagaagtacctgggcaggatgacccggcagcagatggacgagatcggagaagccatcgaggaagccctcgggttgtacgtcccagaagaaatggaggccccgtga

SEQ ID NO: 2815 - DNA, 729 bp, Unknown
  Unknown gut bacteria
tctgtctaccgggaatacctgagcgacccacgcccggagaagatgccgattttggaggacttgtacaacgagcttcgcaggcaggatgaaaaggaagcgcagtatatcgccacggcgctggaaatctacgtcaccggctccctcaacgtgttcaaccaccgcagcaacgtgaatatcgaaaaccgtgtggtcagcttcgatatcaaggagcttggcaagcagctcaaaaagatcgggatgctggtggtgcaggacgcggtgtggaaccgcgtcacgatcaaccgggagcagcgcaagtccacccgctactatatcgacgaaatgcaccttcttctgaaggaggaacagaccgccgcgtatacggtggagatatggaagcgattccgcaagtggggcggcgttcccacgggcatcacccagaacgtcaaagacctgctctccagccgcgaggtggagaacatctttgaaaactccgactatgtgtatatgctcaaccaggcttccggcgaccggcagattctggcgaagcagcttaacatctcgccccatcagctctcgtatgtgacccaatccgccgagggcgaggggcttttgttctacggcagcgtgatcctgcccttcgtagaccgcttccccaaggatacggagctgtacaaaatcatcacgacaaaattgtccgacctctccgaacaaaccggggaggaatcgaaggacgcaattacagtgtaa

SEQ ID NO: 2816 - DNA, 291 bp, Unknown
  Unknown gut bacteria
atgaaattcattttgaaactgctgcttgcgccccttatgctggttttgtggatcgtggaatgggcgctcacgctggcgctcaaggcttccgccgtggtctgcgtcatcgcctccgccctgtttctgctttcaggtgttttttactttgtggacggcaacgtgcagaacggctgcatctgtctgggcattgcgtttctgctctccccctacggactgcactatttggcggtgaagctcacagcgcggtttatcggcatgagggttcttctcagggagcgaatctacggataa

SEQ ID NO: 2817 - DNA, 1638 bp, Unknown
  Unknown gut bacteria
atgaatatggcaaaacgctcgccaaggctgattttcaccgaggaagaacgcgccctgccggagctggagcgcgtcgtccgcaaggcggacagggcggcggataagctggagaaggccgaagcgaaaattcccaagaaaaccgttaaggtcaaaaagcgcgttgtggacagtgagagcggcaaggtcacgacgcgccttttctttgaggaggcggacaaaaagcgtccgccctccaagctggcgcacgccgcaaggaaagcgccgctggataccgtccgcagcgcagtccaccgcaagctccgggaggagggcggcgacaaccccggcacggaggcggcgaaaaccctgaccgagacggcggagcgcacctggcgcattgcggaatcggcgcaccgctcccatgcggaaaagccctaccgcagggcggacaaggcagaagccgccgcagacaaagccaatctcaaggcgctgaacaaacagtacgagcaggaatacggcagggcttccaatccctattcccgttggcagcagaagcaggccattaaaaaggaatacgccgccgcaaaagcggggaacggcgcgaggaataccgtcaaagcgtccgagaccaccgcgaaggcggcaaagcgcgccgccgagggaagcaaaaaggccggcagcttttttgtccggcacaagaagggcttcctcatcgcgggcggcgtcgccgccgcgatactgctgctcatgacctgcatttcctcctgctccacgctgtttcagggcggggtgtccggcattgcggcctccacctatccgctggaggatgcggatatgctggcggcggaagccgcctactgcgccatggaggacgagctgcgggaatacctgaacagctacgaaagcacccacgattacgacgagtaccacttcgacctggacgagattgagcacgacccctatgtgctcatttccatgattaccgccctcaagggcggagaatggacgattgacgaaataggcggggttctggagatgctgtttgaaaagcagtatatcttaacggaaaccgtcaccacggaaaccagataccgcaccgaaacgcatatcggctactacaccgacgaaaacggcaatctgcaaagctacgagtacgaggcggaggttccctacacttactatatctgccatgtggagctggaaaacttcaacctctctcatgtgccggtgcatatcatgtcccacgatcagctctccatgtacgccgtgtatatgagcgtgctgggcaaccgccccgacctgttccccggctccccgtatgtgaaccggtactaccacacccagtatgagaagtacgagatacccccggaagcgctggcggacgagcagttcgccgccattatcaaggaagcggagaagtatctgggctacccctacgtctggggcggcagctcgccccccacctccttcgactgctccggcttcgtttcgtatgtctacaacaactgcggcctgcactggagcttcggcaggctgggcgcggaggggctgcggggtatgtgcgcctatgtttccccggaaagcgcccgtcccggcgacctgatattctttgaaaaaacctacgacaccgcaggcgcgtcccatgtgggcatctatgtg

SEQ ID NO: 2818 - DNA, 1662 bp, Unknown
  Unknown gut bacteria
ctgcgccgcagcgcgcccgtccccatctgctttgagaagctggcggagaatatggacggatacttctccgtggacaaacagcgtatcgctatccgcgaaggcatgagcgcggtgcagacgggatgcgccgccgtccatgagatcgcccactccaggctccacaataaggacgaaatcggggaaaaatatcaggagattgagctattcggcaagcctgcgctgttctccaacgggcgcatcgaccgggataagctgccggagggcttgtatgtatatgacctgcgcggctcggattacgatccgggtatgccggtaacgcttgaaagccatgtcaccgtcaatcacgccgcctctgtcatcacagcagcgcccattgagctgccggagcagggctttttgtatctgggcgaggacgggctgaacttcacgggcggcgagcagaccgtgaaggagttttggcacgcacagtacccggaaaaggcaaagctctccagcgctgccgaggagattcaggcggagagcatctccttcgccgtctgcgcctattacggcattgagacaggcgaaaacagcttcgggtatctggcgacctgggcaaaggacagagagctgaccgagcttcgcgcatcgctggagaccatcaacagaacatcttctgccttgattacggatatcgaccgccattatgcgggaatatgcaaggagcgcgggctggataaggagacggagagccttgccgcccagccggtgcaggagatcgccgtgcaggagccggagccggtcacagcgccggacaacggctgcgtccccgaccctgcgatttccgttgaaagcatgaacgcctacggctacaccgattccaatatgctgccgctgacaaaggagcgcgcgctggagctcatggaacgggatgtaagcgtgtatatgcttcacacggacaacaccgaggccatggccttcgatgcggaggaagtccgcagctttgacggcatcttcggcgtggaagcctccgaatgggagacggtcaaagaccgccttgcgccgccggactatgaaaaggcgttcctcagcaaccccgccgacagctttgccatctatcagcttcgggataatgataatacggcgcagctccgctttatgaacgccgagtatctggagaagaaggggctttccattgaaaaggagaattacgccgccgtctacgcgggcggcctcgaccgcaggggcgatacgcaggacaggttggacgagctgtatgagaccttcaacctccgccgcccggaggattttcgcggccacagcctgtccgtcagcgacatcgtggcgctgaagcagaacggcgtggtatcctgtcattacgtggattcccggggcttcaaggcgctgcccgacttcctcaagccggaaaactatctcaaaaatgcggagatggccatggaggacgcctacggcatgatcgacggggttatcaacaacgggccgaagcagaccgtggcagagctggaggaacaggcaaagtccggcaagcccatctccctcatggagctggcgcaggcgtcacaacaggagaagaagccctccgtgctggcaaagctctgtcctcccgtcaacgagccgaaaaagacagcgcgttcaaggcgcgcggaaagagagctgctatga

SEQ ID NO: 2819 - DNA, 918 bp, Unknown
  Unknown gut bacteria
gacgcctacctctggcagacggtagaaaacaagcagaagttcatctcgcaaatcatgacatcaaaatcccctgttcgttcctgcgaggacgtggacgagaccgctctttcctacgccgagatcaaggcgctgtgcgccggggacgagcgtatcaaggagaagatggacttggatgtggatgttgcccgtctgaagctcatgaaggccagccatcagagccagcagttccgtctggaggacaatctgctcaggcatttccccgaacagatccggcagaacgagagcttcgtggagggattcaccgccgatatgcagacgctcgccgggcatccgcaccccgtggacggctttgcgggtatggaggtcaagggcgaccttcttaccgacaaggacaacgcaggcgctgccattctggaagccttcaaggacgcaaagggcatggagcccgttcccatcggcagctaccggggctttgccatgtccctgaccgtggaggacttcgggcgggactttattctcaccctcaagggtaagatgaaccaccgcgtgacgctgggcaaggacgcgcggggcaacctcacccgcattgacaacgccctgaacgccatgccggacaggttgcagaatgtccgaaacacgctggacgcgctcaccgcgcagatggagacggcaaaggcggagctgggcaagcccttcccccaggaggatgagctgcggacaaaatccgcgcggcttgcggagctgaacgccgagctgaacatcgacgaccgcacacccatggagcagatggcggaggacgcgcccgccgtgcagagcgcaaaggcggagcgtccctccgtgctggcaaagctgaaagcgccgctgtcccagccctgcgccgaggacaaaatcaggcacaggggcaaggaagaacgataa

SEQ ID NO: 2820 - DNA, 399 bp, Unknown
  Unknown gut bacteria
cagaccgcccgaagcggcggcggaggcagtcaaaaaggcaaaggagccgtccctgtgagcgcgcagttcatgcgccggaacatccgcatctccgttcgcctgacggaggaggagcaccggctgctgaaggaaaagatggcgcggatcggcgttaccaatcaggaggcgttcctgcggaagatggcgctggacgggctggtgatcaggctggatttgccggagctgaagcagatgatctcgcttctgcgctacacgagcaacaacatcaatcagatcgccaaacggctcaacgagagcggcagagcctacgacaccgaccttgcggagattctggaaaagcagaagcagctatggggacttgccaacaaaattcttatgaagctgtccaccattcagtga

SEQ ID NO: 2821 - DNA, 534 bp, Unknown
  Unknown gut bacteria
gtgcatatcatgtcccacgatcagctctccatgtacgccgtgtatatgagcgtgctgggcaaccgccccgacctgttccccggctccccgtatgtgaatcgctactactataccaagtatgagaagtacgagatacccccggaggcgctggcggatgaacagttcgccgccatcatcaaggaagcggagaagtatctgggctacccctatatctggggcggcagctcgcccgccacctccttcgactgctccggcttcgtttcgtatgtctacaacaactgcggcctgcactggagcttcggcaggctgggcgcggaggggctgcggggcatgtgcgcctatgtttccccggaaagcgcccgtcccggcgacctgatattctttgaaaagacctatgacaccgcaggcgcgtcccatgtgggcatctatgtgggcaataacagcatgctccactgcggcgaccccattcactacgcttccatcgacacaagctactggcgaagccattttctccagtttggcagattaccttaa

SEQ ID NO: 2822 - DNA, 981 bp, Unknown
  Unknown gut bacteria
atgccgagcaagctacaaacgtatatgcagatggcggacgaggcgcagcggcagatcaccggcagctaccggggctggacgggctttctcaccaccgccgcaaggctgtacaaatacccctacgctgagcaggtcatgatccacgcccagcgtccggacgccaccgcctgcgcggagtacgacttctggaatcaaagaatgggccggtatgtccgcaggggctccaagggcatcgccctcatcgacagcagcggcgaaaggccgaggcttcggtatgtgttcgacgtgtctgacacgggcggaagggagtttccaaagagccgctacctgtgggaataccgggaggaacacgcggacgcggtaagcgccatgctggaaagccgctacggtgtggacggaaaaggagggttccctgaccagcttgagcgcatcgcgtctcagcttgcggaggaatactggcgggactataagcgggatatcctcgccatcgttgacgattcctttctttacgggtatgatgagttcaacgtaggagcggccttccaaagcgccgccgccgtcagcatcgcctactcgctcatgtcccgctgcgggcttgaagcggacgaccgcttcgagcatgaggatttcctgagcatcttcgatttcaacaccccggaagcagccgccgagctgggcacggcggtgagcaggatcaacggagaggtgctgcggcagatcgaagtcaccatcaagaattatgagcgcgagaaactcgcggaaaggagccatagccatgacagagctgacctacaccaagaacggggactacctgattcccgacctgacgctgagcgagacgccggaggacgcgagacccctgggcaagtacgggagactgcgcaggagctatcttcaggagcacagaccggggctgtacagccgtctggtgctgtcggagaagctgttcccgcatctgcgggagatcgacgagacggcgaa

SEQ ID NO: 2823 - DNA, 543 bp, Unknown
  Unknown gut bacteria
ttgaacaatacatctgccgctacccgtgaactccgaatttttgatttcgcccaaattcaaaaattcaaaggagatcacggcatgaaaacattaaaggagttcgattacgacctttgggcaatcgaggaaaacggaagaaagagatatttcgccagaatcaaggccaccggagaggaagcggaggtcagccttgaggtgatgcggctgctgctccgtcaggaaaagcagatgcgccgggagtacgcaaaacagcagaccatcgggccggttctgagccttgacgccatccgcgacggcggaagcatggacgagtccgcatggctgctggatacgcggcagcgcatcgactccgaggtgctcacggcagaactcacagacgcattctgcaaaacgctgacggacagccagcgttcgatctttacggaatgcctcatcgaggggaaaagccagactgcgtatgctgcggagcacggcatcagcgtccctatggtcaacaagcagattcgcgccatccggggaaaggcaaaaatatatttttcctga

SEQ ID NO: 2824 - DNA, 180 bp, Unknown
  Unknown gut bacteria
atggaaaaagtcctttcccgagccaagccgggaaaggactttcaacgccgtacaaagaaatcgggcagcaaaaaagcgccgtcaaagcagaccgaacccatttactggttcagtctgactttgtacggcgcttggcagtctcctcagaacgaatctgattctctccgcttgctcgattaa

SEQ ID NO: 2825 - DNA, 1011 bp, Unknown
  Unknown gut bacteria
cccgacaggcggcacactctggtcgcaaggtacaacgagctgttcaattccaccagaccccgcgaatacgacggcagccacatcacctttgcgggcatgaacccggagatccggctgcgggagcaccagctcaatgcggtcgcccatgtgctctacggcggcaacaccctccttgcccacgaggtaggcgcgggcaagaccttcgagatggtagccgctgccatggaatccaaacggctggggctgtgccacaagtccctgtttgtcgttcccaaccacctgaccgagcagtggtcgggcgagttcctgcggctgtacccctccgccaacatcctcgtggctacgaaaaaggacttcgagccgaagaaccgcaagaagttctgcgcccgcatcgccgcgggcgaatgcgacgccgttatcatcggccactcgcagtttgagaagatacccgtctccatggagcggcagcagcggcttttggcggagcagatctttgaggtggaggaaggtctgcgggagctgaaaagccagcgggcggagcgggtcaccattaagtctctggagcgcaccaagcgcggccttgaagccaagctcaaaaagctccaggacagctcccgaaaggacgacgttgtgacctttgagcagctgggcgtagaccgtttgtatgtggacgaggcgcacaactataaaaatctttttctctacaccaagatgcgaaacgtggcggggctgtccgccaccgacgcccagaaatcctcggatatgctgctcaagtgccggtatatcgacgagatcaccgacagccgcggcgtggtattcgccacgggcacgcccgtctcaaattccatgaccgaattgtataccatgatgcgctatctccagcacgacgccattcgcggcaaggggcttgcccacttcgactgctgggcttccaccttcggagagacgcagaccgccattgagttggctcccgagggtacggggtacagggcgaggacgcgctttgccaag

SEQ ID NO: 2826 - DNA, 444 bp, Unknown
  Unknown gut bacteria
ttggcatacgttcccgtacccaaggacttgaacgcggtgaaaaccaaggtcatgttcaatttaacaaaacggcagattctgtgctttggcggcggcgcgctcatcggcgtaccgcttttctttctgctcaagggccatatcggcggcagcgcggcggctctttgcatgatgctggtcatgctgcccttcttcctgctggccatgtatgaaaagaacggtcagccgccggagaagctcatccgcaacatcgtgcaggtgtgcttcctgcgccccaaacagcgcccgtacaggacgaacaatttctacgacctgctgaaccggcaggatattttggataaggaggtctacgcgattgtccacaaacaaaaaccccgcaagaaagctcacacgagccgagcgaaagcagatcgacgcggcgattgcaagagcaaagcgtcaggataa

SEQ ID NO: 2827 - DNA, 1578 bp, Unknown
  Unknown gut bacteria
gcccactacaccagtcccaccgttatccgcgccatttacgacgcggtggagaacatgggcttccagaccggcaatattctggagcccagcatgggcgtaggcaacttcttcggtatgctgccggagagcatgaaaagcagcaggctctacggcgtggagctggattccatcacgggacgtattgccaagcagctttaccccaaggcagatattaccgtggccggctttgagacaacggacagaaaagacttcttcgatctcgccgtgggcaacgtaccctttggacagtatcaggtcagcgaccgggcttttgacaagctcggtttttccattcacaactactttttcgcaaaagcgctggatcaggtgcgtccgggcggcgtggtggccttcgtcacctcccgctacaccatggacgccaaggacagcgccgcaaggaagtatatcgcccagcgcgcagacttcctcggcgcgatccgcctgcccaacaacgccttcaaagccaacgccggtacggatgtcgtttcggatattatctttcttcaaaagcgggacagacccattgagatcgaacccgattgggtacacacgggtatctggcgaaacccgggagcgaacgcggacggctttgccatcaatcagtatttcatcgaccacccggagatggtgctgggacggcagacctcggaaagcacgcagtacggcaggcaggactttaccgttgcgcccatcgagggcgcagaccttgcggagcagctcagcggcgcaattcggaatatccggggaacctacgcggaagcggagctgcccgatttgggcgaggatgagaccatcgtggagaccattccggcagacccgaatgtgcggaacttctcctacaccgtggtggacggggagctgtactaccggcagaacagcatcatgaccaagcctgacttcaacgccaccgcaaaggagcgtgccaagggcatggtggagctgcgggactgcgtgcagaagcttatctctgagcagatggacggctttatttcggatgaaaccatccggcagacgcaggcggagctgaataccctctacgacggcttcaccgcaaagtatgggcttattaactcccgcgccaacgccctggcctttgccgaggacagctcctactatctgctctgctctctggaggagctggacgaggacaaaaacctcaagcgcaaggcagatatgttcaccaggcgaaccatacgggcgcacgaggccgtgaccagcgtggacaccgcttcggaggcgctggcgctatccatctccgaaaaagcctgcgtagatatggcgtatatggcgcagctcaccggcaaaagccaagacgaactgatcaacgagctgaacggcgttatcttcctcgaccctgtgcgcggggagtggcagacagcggacgaatacctctccggcaacgtccggcagaagctgcgggaggcggagcaggcagcgcaggatagccccggctatctgcccaacgtggaagcactgcaagcggcgcagcccagggatctggacgcaagtgaaatcgaggtgcggctgggcgcaacgtgg

SEQ ID NO: 2828 - DNA, 177 bp, Unknown
  Unknown gut bacteria
gtgcgccacgacctcagacgggcgagcgatacaacttacacgataaaagccgggctgctcccggtggaggcgatgacaggtgttggggacaatgatacttccgtaattcgcggcccggccacaatgaaggcggggaggttcgattcctatggagcggtgcagcacaccgccgcctga

SEQ ID NO: 2829 - DNA, 1458 bp, Unknown
  Unknown gut bacteria
cgcaacgtggcggggctttccgccaccgacgcccagaagtcctcggatatgctgctcaagtgccggtatatcgacgagatcaccgacagccgtggcgtggtattcgcaacgggcacgcccgtctcaaactccatgaccgaattgtataccatgatgcgctatctccagcacgacgccattcgcggcaagggacttgcccacttcgactgctgggcttccaccttcggggagacgcagaccgccatcgagctggctcccgagggtacgggctaccgggcgaggacgcgctttgccaagttctttaatctgccggagctcatgaccctgttcaaggaggcagcggatatcaagacctcagaccagctcaatctgcctacgcccacgcccatctatcacaacgaggtggcgcagcccacggagatacagaagcagatggtgcaggagctgtccgaacgtgcagcaagggtacacgcccagcttgttgaccccggcacggacaatatgctcaagatcacctcggacgggcgcaagctggggcttgaccagcgcatcataaaccccgacctgccggacgacccgaacagtaaggtcaatcgctgcgtggacaacatccaccgcatctggcaggacgggcaggcagacaggctgacccagctcgtgttctgcgatttgtccaccccgaaaaccggcgcgaccggggcgaaggcggcaaagacggcgggcgggaatctggacagcccggagcttcacgcgctggaagctgtcattgggcaagatgcagccgaagaaccggcgttcacgatttacgacgacatccgggaaaagctcgtcgccagaggaatcccccgcgagcagatcgcattcatccatgaagccaacaccgagacgcggaagaaggagctgtttgcaaaggtgcgctccggtcaggtgcgtgtgctcatgggcagtaccttcaaaatgggagccggtatgaacgtgcaggacaggctcgtcgcgctccacgacctcgactgcccgtggcggccgggcgatctggagcagcgcagcgggcgcatcatccgtcagggcaaccgcaataaggaggttcatatttaccgttacgtcacggaatccaccttcgacgcctacctctggcagacggtggagaataagcagaagttcatctcccagatcatgacctcaaaatcccctgtccgctcctgcgaggatgtggacgagaccgctctttcctacgcagagatcaaggcgctgtgcgccggagacaagagaattaaagagaagatggacttggatgtggacgttgcccgcctgaagatcatgaaggccagccatcagagccagcagttccgtctggaggacaatctgctcaggcatttccccgaacagatccggcagaacgagagcttcgtggagggcttcaccgccgatatgcagacgctctcggcacatccgcacccc

SEQ ID NO: 2830 - DNA, 231 bp, Unknown
  Unknown gut bacteria
atgcagaaaaaatatgtgtccgtcagcgcggaggtggatacggacggcgtgatccgcccgcttctcatccgctggcatgacggcagacagtgggaggtgacaaaggtgcttcatacctgtactgcttctcacgatgagtttgaaggcgtccgctacaccgtcaagatcggtcgtgcggtaagatatttgtatcgggagggtcagcgctggtatgttgaccgctccccatag

SEQ ID NO: 2831 - DNA, 870 bp, Unknown
  Unknown gut bacteria
aagttctttaatctgccggagctcatgaccctgttcaaggaggcggcggatatcaagacctccgaccagctcaacctgcctacgcccacgcccatctatcacaacgaggtggcgcagcccacggagatacagaagcagatggtgcaggagttgtccgagcgcgccgcaagggtacacgcccagcttgttgaccccggcacggacaatatgctcaagatcacctcggacgggcgcaagctggggcttgaccagcgcatcatcaaccccgacctgccggacgacccgaacagcaaggtcaatcgctgcgtggacaacatccaccgcatctggcaggacgggcaggcggacaggctgacccagctcgtgttctgcgatttgtccaccccgaaaaccggcgcgaccggagcgaaggcggcaaagacggcgggcgggaatctggacagcccggagctcagcgccgtccagcggctgatcgacaaggaaaaccccgacgaacccggcttcacggtatatgacgacatccgggaaaagctcgtcgccagaggaatcccccgcgaggagatcgcctttatccacgaagccaacaccgagacgcggaagaaggagctgtttgcaaaagtccgctccggtcaggtgcgtgtgctcatgggcagcaccttcaaaatgggcgcgggtatgaacgtgcaggacaggctcgtggcgctccacgacctcgactgtccgtggcggccgggcgatctggagcagcgcagcgggcgcatcatccgtcagggcaaccgcaacaaggaagtgcatatctaccgctacgtcacggaatccaccttcgacgcctacctctggcagacggtggaaaacaagcagaagttcata

SEQ ID NO: 2832 - DNA, 1320 bp, Unknown
  Unknown gut bacteria
ggcggctccggcagcggcaagacgcggtttttcattaagccaaatctcatgcaattacacagttcatacgttgtcaccgacccgaagggcagcatcgccgtggagtgcggaaagctcatgctccgtaatggctacaaggtgaagatattcaattccatcaacttcaagaagtcccaccactacaaccccttcgcatatatccacatcgagaaggatattttgaagctggtcacgaccctcatcgccaacaccaagggggacgggaaatccggggacgacttctggcagaaggctgagacgctgctctacacggcgctcatcggctatatccactacgaagcccccgaggaggaacagaacttcgccacgcttatcgagttcatcaacgccatggaggcgcgcgaggacgatgagacctttgagaacaacgtggatctggccttcaaggagctggcgcagcgggagccgaatcacttcgccgtgcggcaatataaaaaatacaaattagcggcgggcaaaacagctaagtcgatcaatatttcctgcggcgcgcgccttgcgcccttcgatatccaggagctgcgggagatcaccatgtacgacgagctggagctggacaccctgggcgaccggaaaacggcgctgtgtctcatcatgagcgacaccgacagcaccttcaacttcctcattcccatgatttacagccagttattcaacctgctgtgtgaaaaggccgacgacgtgtacggcggaaggctccccgtccatgtgcgctgcctcatcgacgagtgcgccaacatcgggcagataccgaatctggaaaagctcatggctaccatccgcagccgcgagatttccgcctgtctggtgctgcaagcccaaagccagctaaaggctttgtacaaggacaacgccgacaccatcatcggcaactgcgacagttccatcttcttgggcggcaaggagcccggtacgctgaaggagctgaatcaggcgctggggaaagaaaccatcgacaccttcaataccggcgagagcggtggacgggaggtgtccaacagcctgaactatcagaagctgggcaaagaccctgccaagatagacgagctggcggtgctggacggcggcaagtgcatcttgcagcttcggggcgtgcgtcccttcctctcggataagtacgacatcacccgtcaccccaattataagtatctgtcggacgcgaacccaaggaatgccttcgatatcgagaaatacctctccacaaggctggtgccgaaagcggatgaggtctacgaggtattcgacgcgggccgcgtctga

SEQ ID NO: 2833 - DNA, 504 bp, Unknown
  Unknown gut bacteria
accaatatgaaggatattcccgtttacagatttcccgccgagcacgcccgtgaaaacggcgagctggagctttaccgcgcctccaacaaggccagcgccgcctgcaaggaggccattgagaaggcgatctccgagcattattgcgataacgtcctgcaccgggaagccgtcgcgcaggtggcggagcagttcgggcatgagcgcattttatatgtgctggcgattaccatccggcagaaggattgggacgggcggttctctgtggacaacaaacaatgggcaaagagcgttcccgttgcggagaaccccgacgcatgggggacggatcggaactgctatctggcggtgaacaaccacagcgggctggttgatttgtttaccaagctggcgcgggaggacgcaagggtgcatgagcgcaggccctcggtgctcggcagactgaaaagcaaaccgcccgaagcggcggcggaggcagtcaaaaaggcaaaggagccgtccctgtga

SEQ ID NO: 2834 - DNA, 966 bp, Unknown
  Unknown gut bacteria
cagggcttccaaaggagcgtgacagaagccatgtatgactatttctacggcgcggaagcggaacagttctccttctaccgcatccccaaggtgctgttcacggaggaacggttcagaagcgtttccgcagaagccaaggtgctctacggtctgctccttgaccgtatgagcctgagctgcaagaacggctggctggatcgggcggggcgtgtgtatatcatcttcaccatcgaggaggtcatgaccgccctgggctgcgccgaccagaaggccggaaagctgctgcatgagctggagagcaaatgccgccttatcgagcgcaagcggcaggggctgggcaagcccaacctcatctacgtcaaaaactttgtggataaccatgtggataacgcatcgggcagcaccgcgccttccccggaatcacgattccagaaccgtgaaaatcacgattcaggagcagtgaaaatcacggatcaggaagcgttaaaatcacgatctaataatactgagaataatgatactgattttagtgatactgattcctttcccttcacttcgttcaggagggatcacgggcgggaagcgaaaggaaacgaaacggctttaagagagcggtacagagagcttatagcggagaacatcgcctacgacgcactcctgacagactatccatacgagcaggacacgctggaagaaatcctggagcatctggtggatgggtgctgtacgacaaaaagctccgtccgcatttccggcgacgataagcccgccgaggtggtcaggagccaatttttgaagctgaacagcgagcacatccgctttgtggtgggcgggctgaaggaaaacatcacccgcatccgcaatatgcgccagtatcttttagccacgctgtataacgcccctctgaccatcgggaactactaccgaagccttgtgagccacgatatgtcggagggcttcatctga

SEQ ID NO: 2835 - DNA, 1863 bp, Unknown
  Unknown gut bacteria
aagcagctctatcccaaggcggatattaccgtggccggctttgaaaccaccgaccggaaggacttcttcgacctcgccgtgggcaatgtgccgtttggacagtatcaggtcagcgaccgggcttttgacaagctcggtttttccattcacaactactttttcgcaaaagcgctggatcaggtgcgtccgggtggcgtggtggccttcgtcacatcccgctacaccatggacgccaaggacagcgccgcaaggaagtatattgcccagcgcgcggacttcctcggcgcgatccgcctgcccaacaacgccttcaaagccaacgccggtacggatgtcgtttcggatattatctttcttcaaaagcgggacagacccattgagatcgaacccgattgggtacacacgggtatctggcgaaacccgggagcgaatgcggacggctttgccatcaaccggtatttcatcgaccacccggagatgattttaggcagacagacctcggaaagcacgcagtacggcaggcaggactttaccgttgcgcccatcgagggcgcagaccttgcggagcagctcagcgacgcaattcggaatatccggggaacctacgcggaagcggagctgcccgatctgggcgaggatgagaccatcgtggagaccatcccggcagacccgaatgtgcggaacttctcctacaccgtggtggacggggagctgtactaccggcagaacagcatcatgaccaaacccgacttcaacgccaccgcaaaggagcgtgccaagggcatggtggagctgcgggactgcgtgcagaagctcatatctgagcagatggacggctttatttcggatgaaaccatccggcagacgcaggcggagctgaataccctctacgacggcttcaccgcaaagtatgggcttattaactcccgcgccaacgccctggcctttgccgaggacagctcctactatctgctctgctctctggaggagctggatgaggacaaaaacctcaagcgcaaggcagatatgttcaccaggcgaaccatacgggcgcacgaggccgtgaccagcgtggacaccgcttcggaggcgctggcgctgtccatctccgaaaaagcctgcgtggatatggagtatatgtctaagctcaccggcaaaagccaggaggaactgatcgacgagctgaacggcgttatcttcctcgacccagcgcgcggggagtggcagacagcagatgaatatctctccggcaacgtccggcagaagctgcgggaggcggagcaggcggtgcaggacagccccggctatctgcccaacgtggaagcgctgcgacaggcgcagcccaaagacctcgatgcttcggagatagaggtgaggctgggtgcgacgtggatcgaccctgcatatatccgggagttcatgtgggagaccttcgagacacccttctaccagcagcgcatgatcgacgtgaattattccgccttcaccgccgagtggaacatcaggaacaagaacgcggtcagttacagcaatattgccgcatatatgacctacggcacggagcgcgcaaacgcctataagattcttgaagataccctgaatctgcgcgacgtgcgcatctacgataccaagcacgatgcggacggcagggagcggcgcgtgctcaacagcaaggaaaccaccctcgcccagcagaagcagcaggccatcaaggatgcgttccgggactggatatggcgcgaccccgacaggcggcacactctggtcgcaaggtacaacgagctgttcaattccaccagaccccgcgaatacgacggcagccacatcacctttgcgggcatgaacccggagatacggctgcgg

SEQ ID NO: 2836 - DNA, 1971 bp, Unknown
  Unknown gut bacteria
ctctacggcgtggagctggacagtattaccggtagaatcgcaaagcagctctatccaaaggcggatattaccgtggccggctttgaaaccaccgaccgaaaggacttcttcgacctcgccgtgggcaacgtaccgtttggtcagtatcaggtcagcgaccgggcttttgacaagctcggtttttccatccacaactactttttcgcaaaagcgctggatcaggtgcgtccgggcggcgtgatcgtgtttgtgacctcgcgctacacgatggacagcaaggatgaccgtgccagaaaatatatcgcggaacgtgccgagctgctgggagcaattcgcttaccgaacaatgcgttcaaagccaacgccggtacggatgtcgtttcggatattatctttcttcaaaagcgggacagacccattgagatcgaacccgattgggtacacacgggtatctggcgaaacccgggagcgaacgcggacggctttgccatcaaccggtatttcatcgaccacccggagatggtgctgggacggcagacctcggaaagcacgcagtacggcaggcaggactttaccgttgcgcccatcgagggcgcagaccttgcggagcagctcagcggcgcaattcggaatatccgtggaacctatgcggaagcggagctgcccgatctgggcgaggatgagaccatcgtggagaccatcccggcagacccgaatgtgcggaacttctcctacaccgtggtggacggggagctgtactaccggcagaacagcatcatgaccaagcctgacttcaacgccaccgcaaaggaacgtgccaagggtatggtggagctgcgggactgcgtacagaagctcatctctcagcagatggacggctttatttcggatgaaaccatccggcagacgcaggcggagctgaataccctctacgacggcttcaccgcaaagcatgggcttattaactcccgcgccaacgccctggcctttgccgaggacagctcctactatctgctctgctctctggaggagttggacgaggacaaaaacctcaagcgcaaggcggatatgttcaccaggcgtaccatacgggcgcacgaggccgtgaccagcgtggacaccgcttcggaggcgctggcgctgtccatctccgaaaaagcctgcgtggatatggagtatatggcgcagctcaccggccaggacgaggacgctctcgcctccgatcttcgtggtgttatcttccgcaatcccgaaaataagcgctgggagaccgccgacgagtacctctccggcaatgtaagggaaaagctgcgtatcgcacagtctgctcagaatttgtttgagggcgattacgccggaaacgtggaagcgctgaaagccgcgcagccaaaagaccttgatgcttcggaaatcgaggtgcggctgggcgcgacgtggatcgacccctcgtatatccgggagttcatgtgggagaccttcgagacccccttctaccagcagcgcatgatcgacgtgacctattccgccttcaccgccgagtggaacatcaggaacaagaacgcggtcagttacagcaatattgccgcatatatgacctacggcacggagcgcgcaaacgcctataagattcttgaagataccctgaacctgcgcgacgtgcgcatctacgataccaagcacgatgcggacggcagggagcggcgcgtgctcaactccaaggaaaccaccctcgcccagcagaagcagcaggccatccgggacgctttccgggactggatatggcgcgaccccgacaggcggcacaccctggtcgcaaggtataacgagttgttcaattccaccagaccccgcgaatacgacggcagccacatcacctttgcgggcatgaacccggagatccggctgcgggagcaccagctcaatgcggttgcccatgtgctctacggcggcaacacactccttgcccacgag

SEQ ID NO: 2837 - DNA, 1101 bp, Unknown
  Unknown gut bacteria
cagcagcggcttttggcggagcagatcttcgaggtggaggaaggactgcgggagctgaaaagccagcgggcggagcgattcaccattaagtctctggagcgcaccaagcgcggccttgaagccaagctcaaaaagctccaggacagctcccgaaaggacgacgttgtgacctttgagcagctgggtgtagaccgtttgtatgtggacgaggcgcacaactacaagaatctttttctctacaccaagatgcgaaacgtggcggggatttccgccaccgacgcccagaaatcctcggatatgctgctcaagtgccggtatatcgacgagatcaccgacagccgtggcgtggtattcgccacgggcacgcccgtctcaaattccatgaccgagctttacaccatgatgcgctatctccagcacgatgccattcgcggcaaggggcttgcccacttcgactgctgggcttccaccttcggggagacgcagaccgccatcgagctggctcccgagggtacgggctaccgggcgaggacgcgctttgccaagttctttaatctgccggagcttatgaccctgttcaaggaggcggcggatatcaagacctcagaccagctcaacctgcctacgcccacgcccatctatcacaacgaggtggcgcagcccacggagatacagaagcagatggtgcaggagctgtccgagcgcgccgcaagggtacacgcacagcttgttgaccccggcacggacaatatgctcaagatcacctcggatgggcgcaagctggggcttgaccagcgcatcatcaaccccgacctgccggacgacccgaacagcaaggtcaatcgctgcgtggacaacatccaccgcatctggcaggacgggcaggcggacaggctgacccagctcgtgttctgcgatttgtccaccccgaaaaccggcgcgaccggagcgaaggcggcaaagacggcgggcgggaatctggacagcccggagcttcacgcgctggaagctgtcattgggcaagatgcagccgaagaacaggcgttcacgatttacgatgacatccgggaaaagctcgtcgccagaggaatcccccgcgag

SEQ ID NO: 2838 - DNA, 2283 bp, Unknown
  Unknown gut bacteria
cctgaaagcgcaggccgaggagatcatcctcagcgagctggtgtacaactgaccaatgacgcgccggaagcggaaccggcgcagcctccgataccgcaggcataccaactgagcctgttccccacggaggaagagcaaatcgcatatatcgcagaagcggagagctacacgccctccgctttttccatgtccatcccgcaggcggatatcgaccatattctgcgtatggagggcaacgccgactatgcccgcatgaagatcgccacggagttctccaagggcaagagcgtggaagaaatcgcggcgtttcttcaaagcagcttccacggcggcaacggcgtcgtcaccgaaaacggcagatattccgcctggtacgccgaggacggcatccacatcgccaatggggacgcggcaagatacctgacctccgcaaaggtcgtaagctggcaggaggcggcggagcgcatcaggcagcttttggagcagggcgaatatgctaccaacgtggagcttgcggaagcgccggggcacgagcgcacggagctggcacagtccgtatggtatctccggcaggatttaagtgaaaaggtgcgggcgcagggctatctctcctgcctgtcggatatgcggggcggcggtttcccggaggaaacggcgcggcttgccgagcggctgagagaccctgcgttccgcgaagtcctcatggacgatttagcacagctccgatccgactgccgggagtacaggagcctgctgcgcttccattaccacaagccggacaaaatcgagcagggtttgcgggagctgtccctgccccgcagggagtaccgcaccgaaatggcagaaatccccgccgtgcagcggttcattacggaggacgagatcgccgcgaccctgacccgcggcagcaatattgaagggagcaagggtcgcatctacgcctatttcaaagagaaacacagccccaaagagcaggcggatttcctgaaagatgaatacggcattgggggacgctcccacgcggtatccggcgcatcccacagcggtgaggatcacagcggcaagggcgtcgtgctgaaaaagcaggactgcccggaaatccagctgaactgggcgaacgtcgccaagcgtatctctgaactgatccgcaaagaccgtttcctgaccccggaggaaaagacacagtacaagcagcttcagcggcagaccgcagagcgaagcgcagcatggaatgactacaatgccgtaaaggaagcccacccggacgacctcgtgctgtttcaggtgggcgatttctttgagctgtacggcgaggacgcaaaacaggcggcggagctgctgaatatgaacctgaccacccgcaatatccccggcgccgggcgtgtggagatgtgcggtgtaccgtcgcacaatttagagctgtatgtagagaaattgcgcgataagtatgatgtgacgattgccgaagcgccggactttagaggtgaacgccacatttacacgctgcgttccgttgaccatgaggccgaagccgccatcgacgcgcaggaagcggagttcggtgcagatggcacaagggtgttccgcgaccccgccgcagagcaagttcagcccacggtgcaggaacgtttggagcattataggccggtggtgatggcagcggtttcggaggatacggcctatcgcaacgcctgcggtcactccgaccgggaaaatgcggagattgagtgcaacgccgctgtgcgccgtaccatcctcggttcaaaagatatggagctgatccggctgttttcggatgtaccggaattccgcagtcgtttgcatcaggaggtttttgagggaacctatgagcggcttcacgacctgctgcgtccgctctcgcaggacgatatagacgatgcgctccgggcatggaacggaaatatcggaagcaaacacgctgtagtgcggtatatggagcagcacggacgcgaaaaagaaaccgccgcatggctcgctcatgagtacggcggcaaggaaggcaacaatctctttatcgtccgcgccggaagcccggaaaccgttgaactgacgtggccgaaggtgcagcggcggattgcgcagctcatccgagaagataaattcttcacagaacaggaaaagtctctgctggaaaacaacccggactatcgccttttgggtcgtttgcgggcagactgcgaatacttccttggagcaggcaaccgcgcagaaaagcacctgtgggcgggcagcgtctatgcacagatcgtcaaaatgcgggag

SEQ ID NO: 2839 - DNA, 1734 bp, Unknown
  Unknown gut bacteria
cccatcgagggcgcagaccttgcggagcagctcagcggcgcaattcggaatatccgtggaacctacgcggaagcggagctgcccgatctgggcgaggatgagaccatcgtggagaccgtcccggcagacccgaatgtgcggaatttctcctacaccgtggtggacggggagctgtactaccggcagaacagcatcatgaccaagcccgacttcaacgccaccgcaaaggaacgtgccaagggcatggtggagctgcgggactgcgtgcagaagctcatctctgagcagatggacggctttatttcggatgaaaccatccggcagacgcaggcggagctgaataccctctacgacggcttcaccgcaaagtatgggcttattaactcccgcgccaacgccctggcctttgccgaggacagctcctactatctgctctgctctctggaggagctggacgaggacaaaaacctcaagcgcaaggcagatatgttcacccggcgaaccatacgggcgcacgaggccgtgaccagcgtggacaccgcttcggaggcgctggcgctatccatctccgaaaaagcctgcgtagatatggcgtatatggcgcagctcaccggcaaaagccaagacgaactgatcaacgagctgaacggcgttatcttcctcgaccctgtgcgcggggagtcgcacacagcggacgaatacctctccggcaacgtccggcagaagctgcgggaggcggagcaggcagcgcaggatagccccggctatctgcccaacgtggaagcactgcaagcggcgcagcccagggatctggacgcaagtgaaatcgaggtgcggctgggcgcaacgtggatcgacccctcgtatatccgggagttcatgtgggagaccttcgagacccccttctaccagcagcgcatgatcgacgtgacctattccgccttcaccgccgagtggaacatcaggaacaagaacgcggtcagttacagcaatattgccgcatatatgacctacggcacggagcgcgcaaacgcctataagattcttgaagataccctgaatctgcgcgacgtgcgcatctacgataccaagcacgatgcggacggcagggagcggcgcgtactcaacagcaaggaaaccaccctcgcccagcagaagcagcaggcaatcaaggacgctttccgggactggatatggcgcgaccccgacaggcggcacaccctggtcgcaaggtacaacgagctgttcaattccaccagaccccgcgaatacgacggcagccacatcacctttgcgggcatgaacccggagatcaggctgcgggagcaccagctcaacgcggttgcccatgtgctctacggcggcaacaccctccttgcccacgaggtgggcgcgggcaagaccttcgagatggtagccgctgccatggaatccaaacggctggggctgtgccacaagtccctctttgtcgttcccaaccacctgaccgagcagtggtcgggcgagttcctgcggctgtacccctccgccaacatcctcgtggctacgaaaaaggacttcgagccgaagaaccgcaagaagttctgcgcccgcatcgccacaggcgaatacgacgccgttatcatcggccacagccagtttgagaagatacccgtctccatggagaggcagcagcggcttttggcggagcagatctttgaggtggaggaaggtctgcgggagctgaaaagccag

SEQ ID NO: 2840 - DNA, 3654 bp, Unknown
  Unknown gut bacteria
cctgaaagcgcaggccgaggagatcatcctcagcgagctggtgtacaactgaccaatgacgcgccggaagcggaaccggcgcagtctccgattccgcaggcataccaactgagcctgttccctacggaggaagaacaaatcgcatatatcgcagaagcggagagctacgcgccctccgctttttccatgtccatcccgcaggcggatatcgaccacattctgcgcatggagggcaacgccgactatgcccgcatgaagatcgccacggagttctccaagggcaagagcgtggaagaaatcgcggcgtttcttcaaagcagcttccacggcggcaacggcgtcgtcaccgagagcggcagatattccgcgtggtacgccgacgatggcatccacatcgccaatggggatgcggcaagatacctgacctccgcaaaggtcgtaagctggcaggaggcggcagcgcgcatttccgagcttttggagcagggcgaatacgcaaccaacgtagagcttgcggaaacgccggggcacgagtgcgcggagctggcgcaatctatctggtatctacggcaggatttaagcgaaaaggcacgggcgcagggctatctctcctgcctgtcggatatgcggggcggcggtttcccggaggaaacggcgcggcttgccgagcggctgagagaccctgcgttccgtgaagtcctcatggacgattttgcacagctccgatccgactaccgggaggacaggagcctgctgcgcttccatcaccacaagccggacaaaatcgagcagggtttgcgggagctgtccctgtcccgcagggaataccgcaccgaaatggcggagatccccgccgtgcagcggttcattacggaggacgagatcgccgcgaccctgacccgcggcagcaatattgcgggcggcaagggacgtatttatgcctatttcaaagaaaagcacagccccaaagagcaggcggatttcctgaaagatgaatacggcattgggggacgctcccacacggtatccggcgcatcccacagcggtgaggatcacagcggcaagggcgtcagcttgaaaaagcaggactgcccggaaattcaactgaactgggcgaacgtcgccaagcgtatctccgagctgatccgcaaagaccgtttcctgaccccggaggaaaagacacagtacgagcagcttcagcggcagaccgcagcgcgaagcgcagcatggaatgactacaacgccgtaaaggaagcccacccggacgacctcgtgctgtttcaggtgggggatttctttgagctgtacggtgaggacgcaaaacaggcggaggggttgctggatatgaacctgacctcccgcagtatccccggtgctggccgtgtggaaatgtgcggtgtaccgttgcacaatttagagatgtatgtagagaaactgcgcgataagtatgatgtgacgattgccgaagcgccggactttagaggtgagcgccgcgtctataccctgcgttccgttgaccatgaagcggaggccgccatcgacgcgcaggaagcggagttcggtgcagatggcacaagggtgttccgcgaccccgccgcagagcaagttcagcccacggtgcaggagctgttcgagagataccgcctgagcgtgggcaacgcgctttccaaggatgaagcatttctcaacgcctgccgcaattccgaccgtcaaaacgcctatctggagggcgcggcggcaatccggcgcatcgtcacagaatccggcgatttgcagctcacacggctctatttcgatatgcccgcgttccacaaccggctccatcaggagcttttggacgagctttaccccacgctggcaacgacggttacgccctcgccctacaaggtcacgcaggcggacattgacgcggccttgcagcagtggaacggcaggattgaaagcaagcacgcagttgtccgctatatgaaggctcacgcccgcgaccgggataccgccgcatggctggcgcgggagtacggcttgaaggatacctctaaaccgctgcaaatctccgtgggcaattccgagccggtcacgctgtcatgggcgaaggtgcagcggcgcattgcgcagctcattcaatccgataacttctacaccgagcaggaacaggacaactttgacaatattgaccccatcgccatccgggaagcgcttgctgaacgcggtattgtaaatgggcaggttgtggatgcggaggctaatcgcaacagccccttcgtccggcaggtcatggaggatgtggagcggatcgcggcgcaggaagcgcaggaaagaatggcacagcaggaagaacctgcccttgaccccgcagaccgtttccatgtggtaagccttgaccggggcttccgtaccctgtacgccgtgtgggacgacgagacccacggctactatgtggacgcggacggcgtgaccgaggaatttacaagcgaatggcaggcggaggcgtaccggctggagctgcaaggacaggcggagcaggcgcttttagagcgtgcaaaggggctgatctccgacttctgccggagtgaatacggctcagaggcggatttcagcgacccggcgaaaatcggcgtcgcctacaccaccgtcaccgatgatgagattccccttcaggtgaacatcgaccttgtgaattaccggctggagcgctatctggatgacgagcatctggaaacccggcagtacggctctttgcaggagcttatttccaacgagctggaaaacctcgatttcagcgacctcattcatgtttcggatgaggatgtggagcaataccgctggcatgaaccggaagaaacggctcctgccccgcagagagaaccgttcccgtattccgtaggtgatacggtgtatctggaaaacggcaagccgttcattattgagcgcatcgggctttttgatatttctctccgcgacccatcgcttctctaccctatctctcgtgcggagagcagagagagcttcgcgcggctcatggagcggtatcctcagccggaacgggctcctgcttacaccgaggaaaccgtggcggtatatcccggtgacaaaaacaacctcccctatgatgtggagattcgcaccctgcgctttgacgagccggagcctccttcttttgataatgtcatggacgtcaatcccatttccgtgcaggtaggcggcgagtggcagaccttccccaaccgtgaagccgccgaaaaagccatgtacgaggagtataaggacaatcttcgccggaacgcagaaaacttccgcatcaccgatgatgccctcggtgtcggcggcgcaaaagcaaagtttcgggcaaatatggcggctatccatctcctgcaagagctggcgtttgatggcttgcaggccagccctgagcagcaggaaatcctctcccgctatgtgggctggggcgggcttgcggacgcttttgatgaaagcaaggataactggaaagccgaatttgcggagctgtacgccgcgctatccccggaggaatacgccgccgcccgcgcctctaccctcaatgcccactacaccagtcccaccgttatccgcgccatttacgacgcggtggagaatatgggtttccagaccggcaatattctggagcccagcatg

SEQ ID NO: 2841 - DNA, 1407 bp, Unknown
  Unknown gut bacteria
atggcgaccacacgaatcatacccatgcacttaaacaagggcaagacgctggcgcagtgccttgccgaccggacggagtacggcatgaacccggataagactgagggcggcgcgctgatctccgcgttcgcctgcgagccggagaccgccgtttccgaatttgccctgtccaagcgggagtaccgggagctgaccggacgggtgcaggaaagcgacgtcatcgcctatcaggtacggcagtcctttaagccgggagaggtaacgccggaggaggccaaccgcatagggtacgaatttgcccaacgcttcctaaagggtcggcacgcttttctcgtctgcacccacacagacaaaaagcacattcacaaccacatctactggaactccacggcgctggactgtacgcggaagttcaagaacttcatcggcagctatcgcgctgtccgcaggctgtccgacctgatctgcgccgagcaccggctgtccgtggtagagaatccgcagaaacacgggctgagctacaacaaatggcgcggcggtcacgacaagctctccaaccgcgatcttctgcgcatggcgatagacgcggcgcttgaaaagcagccaaaggacttcgacgcgctgctggcgcttttgaaggcttccggctattccgtcgcccgaaagagcaggctgtcactgcgtcacgaaaaccagaaacagagcaaccgtctggattctctgggcgagggatattccgagcaggagctgcgcgcggttctcaccagaagcagggcgcacaagcccttcgtcaaaaagaaatatccgaagcgcagggagcgcgccacgctgattgccgatattgaggcaaagctctatgcgggaaaagcctgccgctacgatcaggcgatgaaggtggtaaagctcaagcagatggcaaagacgctgatatatctggaggaaaacggctttgccgactttgatgcgctggccgacgccgccgccgatgcggagaagcagttctatgctttgaaggcggccataaagacggcggaagcgcgtatgagcgagatacagaccctgcggacgcacatcatgaactattccagaacccgcagcgtttacaccggctaccgcaaggcggggtacacgaaaaaataccctgcggagcatgaggggtatatcctcatccacaaggcggcgaagaaagcctttgatgcgttcggtctgaaaaagctgcccacggtcaggagcctgaacgaagaatttgcaaggctgctggcagagaaaaaggcggcctacgccgagtaccaccgggcgcaggagcagatgcgggagctgctgatccacaaggccaacgccgcctatctgctggggctggatgaacagaaccggcagaccaccgagcggcagcgcgaggaaaaatag

SEQ ID NO: 2842 - DNA, 1830 bp, Unknown
  Unknown gut bacteria
gaccttgcggagcagctcagcgccgcaattcggaatattcggggaacctacgcggaagcggagctgcccgatttgggcgaggatgagaccatcgtggagaccatcccggcagacccgaatgtgcggaacttctcctacaccgtggtggacggggagctgtactaccgtcagaacagcatcatgacccaacccgacttcaacgccaccgcaaaagagcgtgccaagggcatggtggagctccgggactgcgtgcagaagctcatctctgagcagatggacggctttatttcggatgaaaccatccggcagacgcaggcggagctgaataccctctacgacggcttcaccgcaaagtatgggcttattaactcccgcgccaacgcactggcctttgcagaggacagctcctactatctgctctgctctctggaggagctggacgaggacaaaaacctcaagcgcaaggcagatatgttcaccaggcgaaccattcgggcgcacgaggccgtgaccagcgtggacaccgcttcggaggcgctggcgctgtccatctccgaaaaagcctgcgtggatatggcgtatatggcgcagctcaccggtaaggacgaggactctctcgcctccgatcttcgtggtgttatcttccgcaatcccgaaaataagcgctgggagaccgccgacgagtacctctccggcaatgtaagggaaaagctgcgtatcgcacagtctgctcagaatttgtttgaaggcgattacgccggaaacgtggaagcgctgaaagcctcgcagcccaaagaccttgatgcttcggaaatcgaggtgcggctgggcgcaacgtggatcgacccctcgtatatccgggagttcatgtgggagaccttcgagacgcccttctaccagcagcgcatgatcgacgtgacctattccgcctttaccgccgagtggaacatcaggaacaagaacgcggtcagttacagcaatattgccgcatatatgacctacggcacggagcgcgcaaacgcctataagattcttgaagataccctgaatctgcgcgacgtgcgcatctacgataccaagcacgatgcggacggcagggagcggcgcgtactcaactccaaggaaaccaccctcgcccagcagaagcagcaggccatccgggacgctttccgggactggatatggcgcgaccccgacaggcggcacaccctggtcgcaaggtataacgagctgttcaattccaccagaccccgcgaatacgacggcagccacatcacctttgcgggcatgaacccggagatacggctgcgggagcaccagctcaacgcggtcgcccatgtgctctacggcggcaacaccctccttgcccatgaggcgggcgcgggcaagacctctgcgatggtagccgctgccatggaatccaaacggctggggctgtgccacaaatccctctttgtcgttcccaaccacctgacggagcagtggtcgggcgagttcctgcggctgtacccctccgccaacatcctcgtggctacgaaaaaggacttcgagccgaagaaccgcaagaagttctgcgcccgcatcgccacaggcgaatacgacgccgttatcagcggccactcacagtttgagaagatacccgtctccatggagcgtcagcagcggcttttggcggagcagatcttcgaggtggaggaaggtctgcgggagctgaaaagccagcgtgcggagcgattcaccattaaatctctggagcgcaccaagcgcggccttgaagccaagctcaaaaagctccaggacagctcccgaaaggacgatgttgtaaccttc

SEQ ID NO: 2843 - DNA, 1236 bp, Unknown
  Unknown gut bacteria
atgaagaataaatggagtttttttgccgtgatattggccgccgtgctctgcatgacggtcttttccgttaccgcttatgcaggcggcggcgatatggtcgattcgacaatgggcgacccgaccatggaaaccccaactgcaaccacacagccggagaatacgaataccggtgagcagaccccaaacggacagaccctgaccgtgtttgtgaccgaaaatgcggatgggagccataccgtgaccatcggggatcggagctggacgcttcccgccaaacgggagcaggccggaaaggtggtcaacgtccgcacctatttgaacctgcgcaccggccccggcacggactacactgtgattgggcatctgctcaacggcgcggaggtgaaggtgctggaggaaagcaacggctggtacaaggtggtcgtgccggagcagaccggctatgtatacggcaaataccttgaggttctcaacacctctgcgggaggcggtgagaacgacacggatactgcgggactgccggagctgctgctgcaatactacgccgctgccggaggttccgctcccctgaccccggacggcaacctgacgctcatggacgacatcggctccgctttcggcgcaggcaagcagttcatcaccgtgacgaccaagggcggaaataccttttatctcatcatcgaccgggacgataagggcaatgagaacgtccatttcctgaatcttgtggacgaggccgacctgctggcgctgaccaaggacggcgagagcatcgtccccgcctgcgcctgcacggacaaatgcgccgtgggcaaaatcaacacgggctgcaaggtgtgcagaaccaaagtccggcaagcccgtctccctcatggagctggcgcaggcggcgcgccgggaacaggcgcaagcgccccggcaggagaagaagccctccgtgctggcaaagctctgtcctcccgtcaacgagccgaaaaagacagcgcgttcaaagcgcgcggaaagagagctgctatgatgaattttaccaacgatgaaatgaacctcatgtgcatctaccagagcgacagccgcagcgggctgattgccgccctcaccgaaatgcgcggatatttggacgaggacgaggccgagctgcggaagctgaccgacagcgccctgcaaaagttgggcgaaatcaccgacgaggacttcgcggagatggagctaattcctgacttcgacacggacgaataa

SEQ ID NO: 2844 - DNA, 594 bp, Unknown
  Unknown gut bacteria
cccgccaaggctgcgggcaagggcaagaccgctccggtgacagaacgatcataccatcactcccaatgcgaacggaaggagggaaaactcatgcaggaagaaattgaaaacagaactgtcactctaatcatctccgccgtcaagctgaccgcacgggagctgaaggccgggatggataaatatctttccgaaaagaagagcaaagccatggaaaaggcgcgtgccgcgcctgaaaagcccagcggcaagcagacggtgaggcagctcatagggcagaatcagggcgtatccaacattgagatcaccaacagcaatatcaaaggctttgagcgcatagcccggaaatacggcgtggattttgccgttaagaaagaccgcagcgtttcaccgccgaaatactttgtgttctttaaggcgagggacgcggacgcactgacggcggcgttcaaggaatacacggcatatgagcttaaacgcgccgccaaagcgcagaaccgtccctccgtgctggcgcatctgcaagcactcaaggcgaaggttcaggccattacgccggggaaatcccgaaatcagaacaggggcatcacgatatga

SEQ ID NO: 2845 - DNA, 669 bp, Unknown
  Unknown gut bacteria
atgaagaaacctctgaatatcaagaagttcctgctgcccaatatcccgtatgtctttatcgccctctttgccaccaagctgggacaggcggcgcggcttgcccccggcagggatttctcgggaaaggcgctgcacctcatggagggattcgccactgctttttcctcattagtacccagcttccaccccattgacctgtgcgtgggagtcgctgccgctctgctcattcgtcttatcgtgtacgtcaagggcaagaacgccaagaaattccgcaagaatctggaatacggctctgcccgttggggcaagcccgaggatatcgccccttacgtcgatccgaagtttgagaacaacgtcattctcacccagaccgagcggctcatgatgtccaaccgtcccaaagaccccaagacggcgcggaacaaaaacgtgctggtggtgggtggctccggcagcggcaagacgaggtttttcattaagccaaatctcatgcaattacacagttcatacgttgtcaccgacccgaagggcagcatcgccgtggagtgcggaaagctcatgctccgtaatggctacaaggtgaagatattcaattccatcaacttcaagaagtcccaccactacaacccctttgcgtatatccacagcgagaaggatattctgaagctg

SEQ ID NO: 2846 - DNA, 495 bp, Unknown
  Unknown gut bacteria
atgaaggatattcccgtttacagatttcccgccgagcacgcccgtgaaaacggcgagctggagctttaccgtgcctccaacaaggccaatgccgcctgcaaggaggccattgagaaggcgatctccgagcattattgcgataacgtcctgcacagggaagccatcgcgcaggtggcggagcagtttgggcatgagcgcattttatatgtgctggcgattaccatccggcagaaggattgggatgggcggttctcagcggacaacaagcaatgggcaaaggccgttcccgttgcggagaaccccgacgcatgggggacggatcggaactgctatctggcggtgaacagccacagcgggctggttgatttgtttaccgggctggcgcgggaggacgcaagggcgcatgagcgcaggccctcggtgctcggcagactgaaaagcagaccgcccgaagcggcggaggcagtcaaaaaggcaaaggagccgtccctgtga

SEQ ID NO: 2847 - DNA, 567 bp, Unknown
  Unknown gut bacteria
actgtcactctgatcatctccgccgtcaagctgaccgcacgggagctgaaggccgggatggataaatatctttccgaaaagaagagcaaagccatggaaaaggcgcgtgccgcgcctgaaaagcccagcggcaagcagacggtgaggcagctcatagggcagaatcagggtgtatccaacattgagatcaccaacagcaatatcaaaggctttgagcgcatagcccggaaatacggcgtggattttgccgttaagaaagaccgcagcgtttcaccgccgaaatactttgtgttctttaaggcgagggacgcggatgcactgacggcggcgttcaaggaatacacggcatatgagcttaaacgcgccgccaaagcgcagaaccgtccctccgtgctggcgcatctgcaagcgctcaaggcgaaggttcaggcattacgccggggaaatcccgaaatcagaacaggagcatcacgatatgaagaaacctctgaatatcaagaagttcctgctgcccaatatcccgtatgtctttatcgccctctttgccaccaagctggggcaggcgtg

SEQ ID NO: 2848 - DNA, 867 bp, Unknown
  Unknown gut bacteria
atgaacagtgccattgaacagatgctgaaaagctaccatgtagagaatatctacgacagaaagaacgctatgaaggagatcatgcaggaaattgtgctctgcggcttgtcccgtgcgggcttcttcaaaaaagcggcgttctacggcggaaccgccctgcgaatcttctacggtctcgaccgcttttccgaggatctggatttttcgctggaagcggaggatttggactttgacctgacggcctactttcccgtgctggagaaggaagtgaaagcctttgggctgaacgtggagattcaggaaaaggaaaagacaaaagaaagcaccatccgctccgcctttctgaaggggaacacaaaggaacatctcctgctgttctacgcggatgaaaaggtggcgggaagcgtggcgaagaatgaagcggtcaagattaagttcgaggtggacgttaacccgcccgccttcgcctcattcgagcacaaataccggctgctgcccgttccgtatgaggtgaaaatgtatgatatgccctccctgttcgcaggaaaaatccatgcggtcatctgccgtgcgtggcaaagccgcatcaagggcagggatctgtacgactatgtattctatctttcgaggaacaccgccgtcaatcaaaaacaccttcaggcacgattgattgattccggatatatttccgccgctgcggactgttccttgccgaaaatcaaagcgatgctggcggaacgcttcgacagtatcgattacgcacaggcaaggcaggatgtggagccgttcattcacgattcctccgtgctgaatatctggagcgcagactttttcaaacaaatcacggagggactgactgcggtatag

SEQ ID NO: 2849 - DNA, 915 bp, Unknown
  Unknown gut bacteria
ccggagccggtcacagcgccggacaacggctgcgtccccgaccctgcgatttctgttgagagcatgaacgcctacggctacaccgattccaatatgctgccgctgacaaaggagcgcgcgctggagctcatggaacgggatgtaagcgtgtatatgcttcacacggacaacaccgaggccatggccttcgatgcagaggatatccgcagctttgacggcatcttcggcgtggaagcctccgaatgggagacggtcaaagaccgcttcgcaccgccggactatgaaaaggcgtttctcgacaacaccgccgacagctttataatctaccagctcaggggcagcgacgacacggcgcagctccgctttatgaacgccgagtatttggagaagaaggggctttccgttgaaaaggaaaattacgccgccgtctatgcgggaaaccttgaccgcaggggcgatacgcaggacaggttggacgcgctgtatgaaaccttcaacctccgccgcccggaggattttcgcggccacagcctgtctgtcagcgacatcgtggcgctgaagcagaacggcgtggtatcctgtcattacgtggattcccggggcttcaaggcgctgcccgacttcctcaagccggaaaactatctcaaaaatgcagagatggccatggaggacgactacggcatgattgacggcgttatcaacaacgggccgaagcagaccgtggcagagccggaggaacaggcaaagtccggcaagcccgtctccctcatggagctggcgcaggcggcgcgccgggaacaggcgcaagcgtcacaacaggagaagaagccctccgtgctggcaaagctctgtcctcccgtcaacgagccgaaaaagacagcgcgttcaaagcgcgcggaaagagagctgctatga

SEQ ID NO: 2850 - DNA, 1899 bp, Unknown
  Unknown gut bacteria
atgatctttgaaaacccggagttcggtgaactgcgctccctgcgcatgaacggcgaaccgtggttcgtgggcagagacgttgcgatggcgttgggctatggcaaggggaagtctctgaataatgctgtttccaagcacgttgacgatgaggacaaaggggtcactgaaatgatgacccccggcggaaagcagaatgttattatcatcaacgaatccggcctttacgctcttgtcctctccagcaagctggagcgcgcaaagaagttcaagcgctgggtgacggccgaggtgctgccctccatccgcaagcacggcgcgtatatgacggatgcgcttcttagccggatggatgagcaccccgagctgatctcggagtatatcggcaagctccgtgcggaaaacgcaaaggcgaacgccgcgcgggaggcgctgaaaaaggcggaggccgagaacgcgcggctggctccgaaggccagctactacgattcctttgtgggcgtcgagagcgtgacctgtctccgctataccgccaaggagctgggcgttccgcagaagaaatttatcgactacctgctggaaaaggggtatgtgttcagagaccgtcaccgcagcgaccgtgtatttgtcagagccggcaagcgcaacgactcgctgtttgtgaccagggatttttaccttcccaacggcacaaaaagcgaatacaccctcgtcacgcctgccggaaaggcgcattttctgaaaatcgcggagaaaatccgcgtctgggagccccgtgaggttgcagagggcaaagatgccagcgaacaggccgtctttgccgcgtgcgttgacgatccaatcccccacagaatcgaggtgatgaatatggcaaaacgctcgccaaggctgattttcaccgaggaagaacgcgccctgccggagctggaacgagctgtccgcaaggcggacagggcggcggttaagctggaaaaggccgaagcgaaaatccccaggaaaaccgttaaggtcaaaaagcgcgttgtggacagtgagagcggcaaggtcacgacgcgccttttctttgaggaggcggacaaaaagcgtccgccctccaagctggcgcacgccgcaaggaaagcgccgctggataccgtccgcagcgcagtccaccgcaagctccgggaggagggcgacgacaaccccggcacggaggcggcgaacaccctgaccgagacggcggagcgcacccggcgcattgcggaatcggcgcaccgctcccatgcggaaaagccctaccgcagggcggacaaggcggaagccgccgcagacaaagccaatctcaaggcgctgaacaaacaatacgagcaggaatacggcagggcttccaacccctattcccgttggcagcagaagcaggccattaaaaaggaatacgccgccgcaaaagcggggaacggcgcgaggaataccgtcaaagcgtccgagaccaccgcgaaggcggcaaagcgcgccgccgaggggagcaaaaagaccggcagcttttttgtccggcacaagaagggctttctcattgcaggcggcgtcgccgccgcgatactgctgctcatgacctgcatttcctcctgctccacgctgtttcagggcggggtgtccggcattgcggcctccacctatccgctggaggatgcggatatgctggcggcggaagccgcctactgcgccatggaggacgagctgcgggaatacctgaacagctacgaaagcacccacgattacgacgaggaacacggcgacctggacgagattgagcacgacccctatgtgctcatttccatgattaccgccctcaagggcggagaatggacgattgacgaaataggcgggattctggagacgctgtttgaaaagcagtatatctta

SEQ ID NO: 2851 - DNA, 2136 bp, Unknown
  Unknown gut bacteria
atgtacagaaaatttgaaacagagttagctggaagaaagctaacagttgaaacaggaagagttgcagaacttgcaaatggtgatgcaattattcactatggagacacagttgtaatggtaaattttacagcatctaaagaaccaagagaaggaattgatttcttcccactatcagttgattacgaagagaaactatatgcagttggaaagattccaggaagcttccaaaaaagagaaggaaagccagcagacaaggctattttaacatcaagagctatagatagacctatcagacctttatttccaaaggattttagaaatgatgtatgtgttgttgcaacagttttatctgttgagcaagataacagcccagaagtttgtgctatgattggtgcatcagttgcattatcaatttctgatataccatttggtggaccaacagcagctgtaaatgttggatatgttgatggacaaattgttataaacccaacagttgctcaaagagaacatagcagattaaaattaactgttgctggaactatggaaaaggttacaatgattgaagcaggagcagatgaaataccaaacgacacaatgctagattgtataaaagcaggacatgaagaaattaaaaagctttgcaaattcatagaaggaataaaagaagaagttggaaagccaaaatttgaatatgtttcttttgcaacagacaaagatgtatatgctgaaattaaagaaaacttcaaagagagaatgtatcaagatgtacaagctgtggataaagaagttagagatgctaatatggataaattagcagaagatattcaagcatattttgttgaaaaatatggagaagaagagacagaagcaaagagcacagagattgcaaacagcatacacgacctagaaaaagaatgtgtaagagagatgatctttaaagagcacaaacgtccagatggaagaagaatagatgaaataagaccactatcttgtgaagttggagttttaccaagagtacacggaagtgcaatatttacaagaggtcaaacacaagtattatcagtagtaacacttggaacaaaatctgaagaacaagaattagatggattagacgaagaagaatctaagagatacatgcatcaatacaacttcccatcttactcagttggcgaagcaagaccatcacgtggaccaggaagaagagaaattggacacggtgcattagctgaaaaagctctagttccagtaattccatcagaagatgaatttccttatacaataagagttgtgtcagaagtattatcttcaaatggttcaacatcacaagcaagtatttgcggaagcactctagcacttatggacgcaggtgttccaataaagaaaccagtagcaggaatatcaacaggacttgttacatcaaaagaaaatccagatgaatatgtaatgcttacagatattcaaggaatagaagatttcttcggagacatggacttcaaggttggtggaacaaaagatggtataacagctatccaagttgacattaaaaacgatggactaacatatgatataatcaaagaagcttttgaaagaacaaaagttgcacgtgattatatattagacgaaataatgaaaccacaaatagcagagccaagagctgaattatctaaatacgcaccaagaataattacaacaacaatcaatgtagacaagattaaagatgtaataggacctggtggaaaaatgataaacaaaattatagatgcaacaggtgttaaaatagacatcgaagaagacggaagagtttgcatttacacagacgatgcggaaaacggaaagaaagctttaaagatgattgaagatattgcaaaagatatcgaagttggaaaagtttatgacggaaaagttacaagaataatgaactttggagcttttgttgatattggtggaggaagagaaggattacttcatatttctaaaatatcaaacaagagagttgaaaaagttgaagatgttttagcagtaggcgatgaaattaaagtaaaagtttatgaaatagataatcaagacagaattaacttaacaatgaaagacttagaagaaaataaagaaaacaaagaaaaacacgtagaagaataa

SEQ ID NO: 2852 - DNA, 1491 bp, Unknown
  Unknown gut bacteria
atggcagacataaaagaattaatgcaagtacgtagagataaaatgcaaaagctaatagataatggtgtaaacgtacatccagagagatatgagagaacacatcaaattaaagaagcaagagaattaccagatggaacaaaagatgtttcaattgctggaagagtaatgtctaagagaaaattaggaaaaataagtttcatagatctaagggatttagagggacatcttcaactagttattaaaaaagaagatttaggagaagatgtatataaattcttacacgaaacagttgatataggtgacttcattggagtaaaaggagaaatatttacaactcaagctggagaaaaatcacttcaagtttatgaatacacattcttgggaaaggcaatacgtccacttccagaaaaattccatggtttaacagaccaagatgcagtatacagagagagacatcttgatttaataatgaacgatgatgctaaaaagagatttgtactaagaacaaagtttatcagattaatgagagagttcttagatacacatgaattcttagaggtagatacaccagttcttcaaaatacagcttctggagcaactgcaaaaccattcataacacatcataatgcattagatatggacgtatatttaagaatatctccagaattaacattaaaaaaacttataattggtggattttcaaatgtgtatgaaattgcaagagacttcagaaatgagggaatggatgcaaaccatttacaagacttcacaatggttgaaggatatagtgcttattggtgctatagagataatatgaaattcttaaaagaaatgattatatacatattatcaaaattattcgatggaaacttaaatatcaaaattggagaacaagaaattgactttggtggagaatggcaagtagtatcattcagagatttaatacttaaagactgtggaatagatattgacaaattcgaaacagcagaaagcttacttgcagaaataaaagcgaaaggaataaaactagaggcagacaacttagaacaattaggaagaggaaatttaatagatacattatacaaaaaagtaagtagaccaaacataataaacccaacatatctaattgaacacccaatagatttatctccacttgctagaagcaatgatgaaaatccaaaattgacagacagattccaattagtagtaaatggacaagaaataataaatggatattcagagcttgtagactgtgacgaacaagaaaaaagatttatagagcaggctgaattaaaggctaatggtgatgaagaggccatgagtatagatacagaatatataagagctatgcaatatggtatgccaccaatctctggttggggacttggaatagatagattcttacaattcttaacaaacagtgataacataagagatgtagttttatacccattaatgaaaccaagagcagcagaagaaagtgaagactaa

SEQ ID NO: 2853 - DNA, 1809 bp, Unknown
  Unknown gut bacteria
atgaataacaaaaatattagaaatattgcaataattgcacacgttgaccatggtaaaactacattggttgatgcacttttaaaacagagccatgttttcagagagaatgaacaagtagcagaaagagtaatggactctggagatatcgagaaggaaagaggaattacaattctttctaaaaatacatctgttatgtataatggagtaaaaattaatatagttgatactcctggacatgctgatttcggtggagaagttgagcgtgtattaaaaactgttgatggtgttttactattggtagatgcttttgaaggcccaatgcctcaaacaagagaagttttaaagaaagctttagcacttaacctaaaaccaatagttgtaataaacaaaatagatagaccaggtgcagaacctgaaaaagcattggacaaggttattgaattattcatagaattaaatgcttctgatgaacaattagatttcccagttatttatgcatcagctaaaaacggaattgcaaaaatgaatttatcagatgattctgataacattacatgtatattcgatacaataattgataagattgaacctccaacatgtgatatggatggaacaatgcaaatgttagtatctaacatagattatgatgattatttaggaagaattgcaataggaagaatcgaacgtggtaaaataaagaatggaatgccagtttcaatttgtaaacaagaaaaaaatacacaaggaaaaattgctaaattgttcacatacatgggattaaaaagagttgaagttgatgaagttgacgccggtgatatagttgctatatcaggtattccagatatcagcatcggagatacaatttgtgatttagcaaacccagaaaaaataccatttgtaaacatagatgaaccaacagtttctatgacatttagtgtaaacaacggaccttttgcgggacaagaaggagaatttgttacatcaagacacatcagagacagactattcaaagagctagaaagaaacgtaagtttacgtgttaaggaaactgcttctccagatagcttcgaagtttgcggacgtggtgaattacacttatctgtattaatagaagaaatgagaagagaaggatacgaacttctagtatctcgtccaaaggttattttcaaagagattgatggtgtaaaatgtgagccaatagaggacttagttgtaaacgtaccagacgatgcaatcggaacagttatagaaaaattaggaagacgtaaagctgaaatgaagaacatggaaccagcagaagtcggacatacaaaaatagaatttaagattccagcacgtggactaattggttatagaacagaattcttaacagatacaaagggaactggaacaatgaactcaatatttgattgctatgagccatacaagggagacattcaagcaagaacaagaggagttttagttgcattcgaacaaggaacatcaatcacttatggattgtacaatgctcaattaagaggagaattattcataggacctggtgtggaagtttatgaaggaatgatagttggtataaactctagaaatgaagacatttctataaacgtttgtaaagaaaaacaccttacaaacacaagagcttctggatctgatgatgcattaagattagttccaccaattcaattatcattagaaaaagcaatagaattcattgcagaagatgaacttgttgaagtaacaccaaaaaatattagactaagaaaagtaatattaaacaacaaagacagagaaaaagctgcaagaagatag

SEQ ID NO: 2854 - DNA, 1860 bp, Unknown
  Unknown gut bacteria
atgtttgatatagaagcagaactaaaaaaactgcctaaaaagccaggggtttatataatgcacgacaaaaatgacaaaattatttatgttggcaaggctgttgttttaagaaacagggttaggcagtattttagaaagaataagaaaacaaaaagaattcaaaatatggttgcgttagttgaccattttgagtatatagtgtgcgataatgaggcagaggctcttattttggagtgtaatctaattaagaagaacatgcctaaattcaatgtgcttttaaaagatgataaaacatatccatatattaaaattaatgtgaaggcagattatccagatttgtatattacaagaagaattttgaatgatggtgcgaagtattttggaccttatgcgaatgctggaagtgctaaggaaatgattgagtttatcaagtctagatataaaattagacagtgcagaagctttaaatataaggatagaccatgtttgaattatcacataaagaagtgcatggctccttgcatgggatatattagtaaggaagattacagaaagcaaattgatgaaattatttctattttagaaggaaagaccgataatttaaagaaagagctagaaaaggaaatgctagatgcttctaagaaaatggaatatgaaaaagctcaggaaataagagataaaatatttgcgatagatagaatttcacaaagacaaaaggtttcaaatatttctgaaaatgatatagatgtaatcggtttggcaagaaaagacgaagaagtttgtattgagatgttctatgttagaaatagtaagatgattggcagagaccactacatattcaagggcttagaagatgaggaagatagtgaaataatttcaagctttattaaacaatattatatgggaagaacaattctgcctaataaaataatgataaaagaagagattgaagacaaggatgcaatcgaaatgctattaacagaatctgcaggaagaaaagtagaaataaagacaccgcaaaaaggcgaaaaattgaaatttgtagaaatggcagagaacaatgccttaatcactttacagaacaaggaaaaggacaaatacaatattttagcagaattaaaacatgtattaaacttagaaaaattgccaagaaaaatagaatgttacgatatatcaaacttatctggaaccaatatggttgccggtatgtgcgtaatgcaagatggtataataaaaaaagaaatggcaagaagattcaaaataaaagaagttgttggacaagatgatccagcatgtatggaagaagtagtaacaagacgtttaagacattctgtgccaattctaaatgaagacaaactaaacggattcggagaactaccagatgtaatatttgcagatggaggcataacacaaatacatgcaattcaacaggcaataagaaatgtaaacaaagaaatagaacaaaaggcaaaagaaaaaaacatagaactaacagaaaaagacaaagtaaacattactgtatttggaatggtaaaaaacgataagcaccaaacacgtgcattaatgaatgacaaaagagaagagctagaaatttcgcaaacacttttaaacacaataacaatgttccaagacgcagtacatgacacagcaataggataccacaaaaagctaagaaacgaagaagtaaccaggtctgcactagataatataaaaggaataggcactgtaaaaaaagtagaactattaaaaaaattcggaacagtagaaaacatatcaaacgcaagcatagaagaaatagcagaagtaaaaggaataaatgaagaattagcaagaaagataaaaaatgcacttatacattaa

SEQ ID NO: 2855 - DNA, 732 bp, Unknown
  Unknown gut bacteria
atggaacaaaatatagaagatataattaatatgcaagctttgccagagcatgttgccataatcatggatggaaacagaagatgggcaaagaaaaataatttaagcactccacaaggtcacaaagaaggagcagaaaatttaaaaagaattgcaaaatttgcaaataaaataggaataaaacatttaactgtttatgcgttttcaacagaaaattggaagagatcacaagaagaggttggagctataatgaaacttttaaaattctatttgttagatttcttcaattggagtgatgaaaacattaaaataaatgtacttggcaggattgcagaattaccaaaggatttgaaagaccaaatacataaaatagaagaaaaaactaagaataatacaggtttagtattaaatatatgttttaattatggtggtagagacgaaatagtaactgctactaagaatattgttcaaaaagtattagacggagaattaaaaatagaagatataaacgaaaaattattctcaaattatttatatacggctaatcagccagaccctgatttgttaattagaactagtggagaagagagaataagcaatttcttgccatggcagatttcatattcagagtttgtgtttacagataaattctggccagaatataatgaacaagaatttttaaattctatacaaatttatcaaaaaagaacaagaagatttgggggaaacaaataa

SEQ ID NO: 2856 - DNA, 408 bp, Unknown
  Unknown gut bacteria
atgcctagaacaaaaaaagaacaagtagtttttaatggtacaggaagaagaaaaagttcaattgctagagttagaataatgagtggaaaaggaaatatcacagttaatggaaaagcattagacgaatatttcggagaagaaactttaaaagttatagttagacaacctttaacagttacagatacattagataaatttgatgttatttgtacagtaaaaggtggcggattctcaggtcaagcaggagcaattcgtcatggtattgcaagagcattaaatgaagctaacttagaatatagaacagctttaaaatcaaacggattcttaacaagagattcacgtgcaaaagaaagaaagaaatatggtcttaaaaaagcaagaaaagctccacaattctcaaagagataa

SEQ ID NO: 2857 - DNA, 1398 bp, Unknown
  Unknown gut bacteria
atgaatcaaaagaaacaattattagttaacactataataatagcaataggcaagctaagcacacaagttgtgtctttcttgcttttgcctctatatacatcaaaattaagcccagcagagtatggaacatatgactttttggtaactttatcaacatttttgttgccaataataacattgcttatggaagagtctatgtttagattcttaatcgatgccgatgacttaaagagtaaaaaaagagttataacggctacaattgcgtacacactagttggaacttttatatttacagccattgctggaattataatgggtgtaatgcattatgaatatgcatttgtatttatattgtttataatttcaaatatcttattgggattgagcaatgcattggctagaggaactggaaagataaaattatattctttctcaaactttatattgggagcctctacaattgtactaaacataatattcatagtaagcctaaagcttggtgtcagtggacttttatgggcaaatacagtcgcaaacagtgcaacagcaataataatcttgttaaaattacatttaccacagttcgtaagtagaaaagattttcacaagtctactttaagagaaatgcttagatactcagtaccacttgtaccaaacaatttatcttggataatcataagcttgtcagatagacttatgcttacagcaatgagtggtacagaggcaaacggaatttattctattgcaaataaatttccaaatataatttatacatgttacggatttttctctactgcatggaaagaatcggctgcaaaaatattaaaagatgataacaaagtaaaatattataacagtatttacaaagatataaaattctttttaaaggcaatcgtattaggattaattgcaataatgccatttgtattttctttgtttgtggacgcaagctataatgatgcatacaaatacattccaatacttgtaatatcaatttattacacaaatatgtcaaacttctatgggggaatatttacagcatataaaaatactaaaataatgggatcaacaacagttgcggcagcaattatcaacatagtaataaacataatattcataccaaaattcggaatatatgcagcatcattttcaacattaatttcaaatttgattgtgtttgtatacagaagatataaattaaaagagtatatagttttaaaagaaaaattcaattatgtgttttggatattgctagtagcgacactaataacatattacaaaaacaatttaattgcaaacataataatgtttataatagtgcttgcatactgtatatttacaaatatgagcttcttaaagaaaatagcagaaccagtaataaataaatttaaaaaatag

SEQ ID NO: 2858 - DNA, 921 bp, Unknown
  Unknown gut bacteria
atgataaaaactatatatatggaggtaatacaaatgaatgaaaaaatgtatgaaattatgagagatggaagaggatttattgctgctcttgaccaaagtggaggaagcagtgcaaagactctaaaaaattatggaatagatgaaagtgaatatagctcagaagaggaaatgtttaatctaatccatgaaatgagaaaaagagttatgacaagcaaagtgttcacaaatgagcacattttaggaacaattcttttcgaaaaaacaatgatgtcagaagtaaatggaaaatttacagcagattatttatgggacgaaaagggaatagtttctttcttaaaagttgataagggattagccgaagaaaagaatggcgtaaaattaatgaaagaaattccaaacttaaaggaagaaatagaagaagcaagccaaaagcatgtatttggaacaaaaatgagatctgtaatatatgaagcaaacgaagaaggcataagagatattgtaaatcaacaattcgaatttgctaaaataatatgtgatggtggattagttccaataatcgagccagaagtagacatacattcagagcaaaaagaactttgcgaaaaaatattaaaagacgaaataataagaaaactaaaagaatggaatccagcagacaaaataatgttcaaatttacaataccaacagttgcaaaccattacttagatttatatgattacgactgtgttgtaagaattgttgctttatctggcggatacgagatagatgaagcatgtgaattacttgctaaaaataacagaatgatagcaagcttctcaagagcattattacaagacttaaatgcacatcaaacacaagaagaatttgatacagcattaaacaatgcaatagtaaaaatatacaatgcatcaatagactaa

SEQ ID NO: 2859 - DNA, 1074 bp, Unknown
  Unknown gut bacteria
agaaaatttatgtttcaaaagttagaagcagtagaaaatagatacgaagaacttaataaaaaaattgcagacccagaagttattgcaaatacaagcgaatggacaaagttcatgaaagagcatgcagaaatagaagaggttgcattaaaatataaggaatataaacaagtacaacagagtattgaagaagctcaagaaatgctaaatgacccagaaatgaaagaattagcagaagaagagttgtatgaaaataaagaaaaacttccaaagatagaagaagaactaaaaatattacttataccaaaggatccagatgatgataaaaacataatttgtgaaatcagagctggagctggtggagacgaggcagcattatttgctggaactttatacagaatgtattcaatgtatgcagaaagaaaacactggaaaatagaagttttaaatgaaaatgaaactggacttgggggatataaagaaatatcattcatggttactggaaaaggtgtttatagtagactaaaatttgaaagtggagttcacagagtacaaagagttccagaaacagaagcaagtggaagaattcatacttcaacagcaactgttgcggtattaccagtagtagaagatgttcaaatagaaataaatccagcagacattaaactagaagtatttagagcttctggtgccggaggacaacacgtaaacaaaacatcatctgcagtaagattaatacatgtacctacaggaatagtagcagagtgccaaacagagcgttctcaaacacaaaacagagaatatgcaatgaaacttttaaaatctagattatatgaagtagaaaagcaaaaacgtgattcagaacttgcaaatgagcgtaagagccaagtaggaagtggagatagaagtgaaaaaatacgtacttacaactatccacaaggccgtataacagaccacagaatagggcttagtatatatcaaatggaaaacttcctaaatggagacttagatgaaatgatagataacttaattgcagcagatagagcagaaaaattacaaggaaatgatgaagaataa

SEQ ID NO: 2860 - DNA, 582 bp, Unknown
  Unknown gut bacteria
agttgtaggtttattgtgtgggttgacttttttgaagtcaatcttatttttttggaggtgttttttataaaacaagaattactaattaatgaaaaaattagagcaaaagaagttcaactaattggagcaaatggagaaaagcttggagtagttggtattgaagaagctttagatatggctgcagacgctaaattagatttagctttagtatcacccaatgcacagccaccagtttgcaaacttatgaactatggaaaatataagttcgagcaagctaaaagagaaaaagaatcaaagaaaaatcaaaagacatttgagcttaaagaattaagagttactccaaacatagagcaacatgattttgaattcaaggcaaaaaatgctagaaaattcttacaagacggtaacaaagttaagattactgttagatttagaggaagagagctaaactatgttaaagctggagaagaaactctaaacgaatttatagaaaacttatctgatattgcaacggttgagaaaaagcctttattagaaggaaagaacatgtttgtaatattagcaaaaaaagtagaaaaatag

SEQ ID NO: 2861 - DNA, 666 bp, Unknown
  Unknown gut bacteria
aaaatgggacaaaaaatgaatccaaacggacttagagttggaatcataaaagactggaactcaaaatggtatgcagattcaaagcattttgcagattatctagttgaagatcacaaaatccgtgaatatgttaagaaaaaattatacgctagcggaatttcaaaagttgaaatcgagagaacagcaaaattcgttaaagttaacgtatacacagctaaacctggtctagtaataggaaaaggtggaaatttagctgaaagcttaaaagcagaattacaaaaaatgattggaaaagatgtaaatctaaatattgttgaggttaaatcaccagatttagatgcacaattagttgctgaaaatatagcaggacaactagaaagaagaatttcattcagacgtgcaatgaaacaatgtatgcaaaaaacaatgaagatgggagctttaggaataaagacatctgtatcaggaagacttggtggagctgatatggctagaactgagttctacaaagaaggtacaataccacttcaaacattaagagctgacattgattatggatttgcagaagcaaacacaacatatggaaaagttggagttaaagtttggatatataaaggagaagttcttccagctaagaagaaagcagtggaaggaggagacagataa

SEQ ID NO: 2862 - DNA, 1449 bp, Unknown
  Unknown gut bacteria
atggcaagagaagattatgaagttgttataggactagaggtccatgcagagctttctacaaaaacaaaaatattctgcaactgctcaacagaatttggtggaatgccaaatacacacacatgcccaatttgtatggcaatgccaggaactcttccagtattaaacgaaaaagtagtagaatatgctgtaaaagcaggtcttgcaacaaattgttcaatttcaaaagacagtaaaaacgatagaaaaaattatttctacccagacttaccaaaatcttaccagatttcacagtttgacaagcctctttgcaacaatggttacatagaaattgaagaagaaaacggtgaaaagaaaaagataagaattttaagaattcatattgaagaagatgctggaaagttaaaccacaacgagtttagcgaggggagtttagttgatttaaacagagctggagttcctctaatagaaatagtttctgaaccagatctaaggtctgcaaaagaagcagatgcttatttgaaaaaattaaaatctacattagaatatatagaagtatctgattgtaagatgcaagaaggttcatttagagcagacgtaaacgtttctatacataagccaggaacaccatttggaacacgtacggaaatgaaaaacatgaactcatttaagtcaatttcaagagcaatagaatatgaaattcaaagacagtcagaagtactagataatggcggaattatagagcaagaaacactaagatgggacgatgtatctggtagaacattttctatgagaaacaaggaagatgcacaagattacagatatttcccagagccagacttggttgcaataaaattatctgatgaatatatagaaaatataagaaaaacacttccagagttgccagaaagcagaaaaacaagatacatggaagagtacaagttatctgaaaaagatgctagattacttactgcttctaaatatttatcaaacttgtttgaagctgcagagaaaatatgcaaaaacgcaaaagcagttgccaactggattttatcagatatttctcgtatattaaacgaggaagagctagagccagaacacattccatttacaggagctgaacttgcaagtctagtagaattgatagacaaaggaacaataagttctgcaataggtaaaaaagtgcttgaagaaatgtttgtagaagatgctacaacacgcaagccagaagaaataataaaagcaaaaggctggatacaaatttctgatgaaggagctataaaagaggttgtaatgcaagtattagaagcaaatccacaatcaatagcagactacaaagcaggaaaagacagagccttaggattcttagttggacaagcaatgaaaactacaaaaggcaaggcaaatccacaaatgttgaacaaaatgtttatagaagaaatgaataaataa

SEQ ID NO: 2863 - DNA, 2115 bp, Unknown
  Unknown gut bacteria
atgagagtaacaacatataaagactatgaaagaaggagattttttttaatgacagatgagaatttaaataaagatggaaacgttggaactgaaaacaatgtttctgatactggcgtaaagagaagagaaggacgccatagaaattacaataggagagaaagtacaagtagaaatagtactagaagaactacaacagagacagcagaaaatacaaaaggaagtagaagaccacgtagaagtagagaaaacagaaatgagaatgcttctgcagaaagtaacgaaatattagaaaaaaatataacaagccaagaaaatgagaacacaaagcttgcaaaaacaagaagacatgaaggaggtcttgttaaggtagagaatagagcaatagcaaaaagaccagaaagagcaattgcaaagagaagcgaaaggtcaattaccaagagagaagattttagagttaagaaaccatcaataaaaataattccattaggtggtatagaagagattggaaagaatattacagttttcgagtatgaagatgatattatagttgttgattgtggacttgagttcccaacagatgatatgcttggaatagatttagtaattcctgatgttacttatttggtaaagaataaggaaaaggttagaggaatggtaattactcacggacacgaggatcacattggatcaattccatatgtattacaacaaattaatatgccaatttacgcgacaaaattaacttgtggattgattaaaggaaagttagaagagcatcatttattaaggtctacaaagcttgtagaagttgatgctggtcaaacaattaaattaggaaaattttcggttgagtttattagaagttgccatagcattccagactctgtaatgcttgcaattacaactaccgcaggaacaatacttcacactggagattttaaaatagattatactccaatcgatggaaagccaatggatttaggtagaattgcagaacttggaaataagggaatattggcacttatgtctgatagtacaaactctgaaagaaaaggatttacaatgtcagaaaagtctgttggagcagttttcgacaaattgtttatgaactgtaaaaaaagaattgttgtagcaactttcgcatcaaatgtccacagggttcaacaaattgtggattcagctgttaaatatggcagaaaaattgcagtttgtggtagaagcatgataaatatgattgaaaacgcaagagctctaggttatataaatgctccagaagatattttcatagatatcgatttaatacgtaattacaatgatgagcaattagtaataattacaacaggtagccaaggcgaaacgatgtcagccttaacaagaatggctgcaggagagcataaaaaggttactattacaccaaatgatttagtaataatttctgcaaatgcaataccaggaaatgagaagcttgtttctaaagttatagatgatttaatgaagattggtgcagaagttgtatacagtgcattagctgatgttcacgtatctggacacgcttgccaagaagagcaaaaattgatattatctttagcaagaccacaatacttcataccagttcatggtgagtatagacaattaatggcacatgcagaaactgctaaagaactgggaatacctgcacaaaacatatttataacacacaatggtagaatattagagttaaataaagacgaagcaaaattcacaacatcagtaccatcaggaaaagttttagtagatggattaggtgttggagatgttggaaatattgtattaagagacagacaacatttatctcaagacggattaattgttatagtattaacaatggactcatcaacaggtgaaatagtatctggaccagatgtaatttcacgtggattcgtttatgtaagagaatctgaaaacttaatggaagacgttaaaaacgtgataaaacaagaagttgcaggatttgaacaaagacatataacagattggtcaacaataaaatcaacattaaaagatgatttaagagactatatattccaaaaaacaaagagagacccaatgatattaccaataataatggaagtttaa

SEQ ID NO: 2864 - DNA, 369 bp, Unknown
  Unknown gut bacteria
atggtacagcaacaaacaatattaaaagtagctgataatacaggagctaaagaattaatgtgtattagatgcttaggcggatcatatagaaaatatgctggagttggtgatataatagttgcttctgttaaaacagcaacaccaggtggcgttgtaaaaaaaggtgacgttgttaaagccgttgttgttagaacaaagaaacctataagaagagctgacggatcttatttaagatttgacgaaaacgcagcagttataataaaagaagacggaacaccaaagggaactcgtatatttggacctgttgcaagagaattaagagaaaaggactatttaaagattctttctctagcaccagaagttttataa

SEQ ID NO: 2865 - DNA, 789 bp, Unknown
  Unknown gut bacteria
atggcagtagttgcaatgaaacaattactagaagctggtgttcatttcggacatcaaacaagaagatgggatcctagaatggctgaatatatattccaagctagaaacggaattcacatcatcgatttacaaaaaacatcaaaaaaattagacgaggcttatgctttcttaaaagagcaagctgaagaaggaaaaacagttctatttgttggaacaaagaaacaagctcaagactgcatgaaagaagcagctgaaaaatgtggtatgtactacgttaaccaaagatggttaggtggaatgcttacaaactttgctacaatcgaaaaaagaattgaaagattaaataaattagaaaaaatggaagaagacggaactttcgaagtattacctaagaaagaagttattcttttaaagaaagaaatggataaactagagaaaaatctaggtggaatcaaaaacatgaaagaaatgcctggagttttattcatagtagatcctaaaaaagaaagaaatgctatattagaagctaaaaaattaaacattcctacaataggattaatcgacacaaactgcaacccagatgatgttgattacgttatcccaggaaatgatgatgctataagagcagttaaattaatagctgatacaatggctaatgcagtaatcgaaggtagacaaggagaaactctagaagttacatcagattcagaagatgctatggagacagaagaagctacagctccaacagatatggaagaagtagttgaagcagctagcgatgctgaataa

SEQ ID NO: 2866 - DNA, 366 bp, Unknown
  Unknown gut bacteria
atggctcgtttagcaggagttgatttacctagagaaaagagaatagaaataggacttacatacatatatggaataggtttagctcgttctcaagaaatattaaaaaaagctggaataaatccagacattagggtaaaagatttaacagatgaacaagtacagctaattagaaatgcaatggaaggttacactctagaaggtgacttaagaagagaagttgcattaaacataaaaagacttacagaaattggttgctatagaggaactagacatagaagaggtcttccagtaagaggacaaagaacaaaaactaatgctcgtacaagaaaaggaccaagaaaattagtaagtaagagcaagaaatag

SEQ ID NO: 2867 - DNA, 627 bp, Unknown
  Unknown gut bacteria
atgtcaagatataaagacgaacaatgccgtatttgccgtagagaaggacaaaaattgttcttaaaaggctcaagatgctattctgacaaatgtagcataacaagaagaaattatgcaccaggacaaaatggtcaaaaaaagagcaaaatttctgaatatggtactcagttaagagaaaaacaaaaaacaaaagctttctatggagtaggagaaaaacaattcagaagatacttcgatatggcttcaaatagcaagggtaaaacaggtgaagtattacttcaaatacttgaaagcagattagataatgtagtatatagattaggattcgcaagctcaagagctcaagcaagaatgcttgtaacacatggtgcttttgaagtaaacggacacaaagttgatataccatcatacttagtaaaagccggagatgtaatcgccgtaagagaaataagaaaagacaatggagcaataaaaattgctgtagaagaaaatggaagtagaccagttccagcttggctagaaaaagaccaagaaaaattaagtggaaaggttgtaacattagcaacaagagaagatattgacctacctgttgaggaacatttaatagtagagctttactctaaataa

SEQ ID NO: 2868 - DNA, 426 bp, Unknown
  Unknown gut bacteria
gtgataaggagggaaaacaagaacatggttactacagatccaatagcagatatgctaacaagaataagaaatgctagcagtcaaaaacataaatctgttgatgttcctgcttcaaaagaaaagcttgcaatagctcaaatattatttgaagaaggatatatcaaatctttcgaagaaataaaagaagaaaataatcaaggtgtaataagaattacattaaaatatacagaaaaaggtaaaaaagtaatagatggattaaagagaataagcaaaccaggattaagagtttacgcatctaagacagaattacctaaagtattaaatggattaggaatagctttaatttcaacatctaaaggaataatgacagacaagaaagcaagagaagctggtttaggtggagaagttatagcatacgtttggtaa

SEQ ID NO: 2869 - DNA, 1626 bp, Unknown
  Unknown gut bacteria
atggaggtaaaaaaattggaatatacagcgttatatagaaaatttagacctttaaaatttgacgaaatagttgggcaagaacatattgtaagaacattgaaaaatgagcttattaatgatagggttggccatgcttatttatttaatggtggtagaggaactggaaagacttctgctgccaaaattttagcaagagccgtaaactgcttaaaccctaaggatggagagccttgcaacgagtgtgcagtttgtaaagcagcacttgaaggttcacttacagatatagtagaaatggatgctgcatctaacaatagtgttgaggatgttagagccattagagacgaagtaaatttcttaccaacagttgcaaaatatagggtatatattatagatgaagttcatatgctttctacgggagctttcaatgcattacttaaaactttggaagagccaccagcacatgtaaagtttattttggctacaacggaaccacaaaaattgccagcaacaatattatcaagatgccaaagatttgattttaagaaaatatcaaatgacaacatagaaaaaagattgaattttgtatgtgagcaaagcaatatagatattactccagaagcaaaaaagctaatagcaatattagcagaaggtgcaatgagagacgctcttagcatattagaaagatgtatgcaagaagaaggaaaaataaccgaagatttagtaaaagaattggttggaattccaaaaacagaaagtgtaaataaaattacaaaaagtattttgcaaaaaaatactgaagatgcacttgatgcaataaacgagattatttcagaaggaaaagacataagtaatttcttatgggaaataataaaatatgtaaaagatattcttgtgtttaaaacaaatactaagcttgaaatttacagtgaagctgagaaaaatcaaattaaagaattagcagatagcacgacgaaagaaagattaatttctatgatatatgaattatcagatttgcaaaacgatatgaaatggtcatcacagaaattgataatgtttcaagttacaataataaagctgtgcaacgaagctagcacgagtagtacagtaagttccggagattcaggggctagttcaaaagaggttgaagatttaaaatacaaaataaatagattagaaaaacaaattacacaattacaaaatgcaccacgtgcagtagcttcaagctctacgagtcaagaaagcaagactcaatatgcaattaaaccagaagtaaagaaatcaacaaatgttaaattgggcgacaaggtacaaaattggccaaaaataatagataatatcaaacaagaaggcagaatatcattatcatcaatattaatgacatcttctgcaaatgaaataaacgacatgacagtcggaattaatttcgaaaatggactaacaccatttagaaaagatattcttgaaaagccagaaaacatgagtgagattgtaaagcaagtatcaatggaacttgggaagccaatgagagttgtacttgtagataataatgaagaaatagtgtctaagacagatactttcagcgatatatcgaatggattggatataccgattaatataattgattaa

SEQ ID NO: 2870 - DNA, 1677 bp, Unknown
  Unknown gut bacteria
atgcggttatcttatgatactattaccttgatgaatatttataagaggtataatatgtggagtattaaagagataaaacaaaaaggcaagaaaacattaaaaaataatttatggacattacttttaattggcttatttatgacgattgtagttgggaagtatgctgttaataacgattctttatcaaacttgaatgttttgaaacaatttatagaggatagaaaaaatggaaaagagctaacctggattgacaaagaaaatccagaagtaatgttaaataaatatcttgatgagatggtttctcagatgttttctggaaatagtagtgttattacagatgtaataaatgattacaacgaaaagaataatgttactaaaggcgtattttatacggtgtttaatgttgtaactaagggacatgaacatgttcaaaaaattattcaaactattgcaagttacgaaaataaaacaacaattttgaaaattctaattattgtagttgctgcaggaggtatggcaataaaaatatttatatcttacccaattcaaataggagagacaagaatatacttagagagtagaaattacaagaaaacaaaagtgtatagaatgttgtatccatttagaaaaggaagatatttaaatgtagtaaaatccatgctacgaatggaaatatatcaacttttatggaatttgaccattgttggaggcattataaagaagtattcatacaaaatggttatgtacataattgcggaaaatccacaaattagttcgaaagatgcaataagaatttcaagagaaatgatggacggaaataagtggagagcatttttattagatttatcatttattggatggaatattttacaatacattacgtttggattagctggaatttatgtttcaccatattatactgctacagaagtcgaattatacgcatttttaagaaaagaatacatagcaaataaaaaatatggatatgaattattaaatgatacaaaattgtatgaagaaaatccaggaacagcaagctatccagatgcatttgaatttgaaagaaagaagataaaaattgactataataaaaattatgagcttacatctataatattatttttctttattttttcatttgtaggctggttgtgggaagtagcactatatttatttagagatggaatattagtaaacaggggaactttatatggaccatggttaccaatttatggaacaggttgcacactcatagtacttttaacaaaatttaaaaagtttagaaagatgttgaaaaatccatttttaacgtttactgttgtaatgagtttatgttctgtaatagaatatgcaacttcttggtatatagaggttactactggaataagatactgggattatacaggagtattcttaaacataaatggacgaatttgtttagaatgttcactattctttggtctcggaggtgtattatgtgtatatattgtggcaccattcttagaaagaaatttgcaaagattaacaaataaattaaaaatatcaatgtgcatagccttgctattgatatttggagcagacaatgtttactcacattttcatccacacgttggagaaggaatatcgagcagtgtagaaaatcctactaaagtgccaaacttaatacaaagattttag

SEQ ID NO: 2871 - DNA, 2106 bp, Unknown
  Unknown gut bacteria
atgttagtgaaaagaccacttttaattgttactatatcatacatattaggaataattataggggtatactttcagcaaagtatactctttattttgcttacaggaattactggaattgtattttggaaaataataaagaagaaaaaaattgtaattattgcaatatgtattgtaccatgtttattgtcttgccagcagaccaataatttaaataataaatacaataaaatgtataaattagctgatgaaaacattgcaatgacgggaactgtgtgcagtcaaataaaggagactgattataagtattctgttaatattaaactagaaaataaattaaaattaacagtctatatagataaaaaagaaaatgtttcaaaattagaatacggcaataaaatatctgttacaggaacgtataagaagccaacagggaaaagaaattataaaggctatgattatatgaaatatttaaagactaaaaagatatgtggctctttaatggtagatggaagagtaaagctgataaaaactaaaaatattaatctaatatttgcaataataaacaaattatcgctaatttttaaacaaaattttaagaaattattaccagagcaagaagctgaacttgaacagggaattttattaggagacacgtctgatatagaaagtgagattaaagatgattttagagaatgtaatttatcgcacatgctagcagtatctggagctcatttatcttatctagtgttaggaataaatactgttttaagcaaaaaggcatttggaatacgaagaagaaaaattttatctataatatttatcttaatttttatggttattgttaatatgagcccatcggttgtaagagctggaatatcaactattatagcaatatttgcaactttaatttacagaaaacaagatacatatacaacaatttcaattgctctgttattaacattattaaataatccatttgcaatttttgatgttggattacagctgtcatatcttgcaactttaagcataataattttttattctaaattcacccaaaaacaatttaataataaagtaaaaaagtatttgtatgagagtgcgatgctcactttgagtgcaaacattttaattcttccaattacaatctatgaattcaacacaattccaataaactcaataatatcaaatttgttagctggtccattgcttggaatatgcataatattaggcatgttcacggtaattctttcaacagtttgttttcctatatcaaaattaatagcatttccattgcaaattattttaaaaattctaataaagataataaaattaatttctaaaatgccatttggaaattatactgtaaaaactccatggttcatagtagtgtttttaacttatgcaataattgccacattaatatataacaaaaagaagattactaaaattttaactatggttactttaataatatttattgttatgcaggtttgcgcttttataaatattgatggaaaactaaaaatctattttatagacgtaggacaaggagatagcatgcttgtaaaaactgtgaatggaaaaaatattttaattgatggcggtggaagtaaggatccagattatgatataggcgaaaagattttagtaccatatttgctagatagaagaataaaaacattggattatgtaattatatcacattttgatgaagaccatgttggtggaatattgactgttatgcaagagttgaaagtgaaaaaagcaataattgcaagacaatttgaaaactctaataattataaaaaatttattaaattagcacaagaaaagaaaattaaagttattgttgtagaagctggaaatgtgataaatatagaaaaagagataaagctaaaagttttatggccagactcaaaaaataagattaatgaaaatgttttaaacaataattcgcttgtttgcaagttagaatacaaaagtttttcaataatgttgactggagatatagaagaaattgcagaaaatgcaatattaaccaaatataaaaataatgcaaaaatattgaaagccaatattctgaaagtagcacatcaccggctctaa

SEQ ID NO: 2872 - DNA, 2142 bp, Unknown
  Unknown gut bacteria
atggcagataaattaattattgttgagtcgcctgcaaaggctaatactataaaaaaattcttaggtggaaatacgaaagtagttgcatctatggggcatataagggatttaccaaaatctaagcttggagttaatattgaaaatgattttgagccagagtacataaatattaggggaaagggagatttaataaaatccttgaagaaagatgccaaaagtgcaaaaactgtgtatcttgcaaccgaccctgatcgtgaaggagaagctattgcttggcatttggctcatattttggaaattccagaagatagtgtatgtagagttacttttaatgaaataacaaaagaaactgtacaacaatctataaaaaaaccaagaaaaatagatatgaatttaacaaatgcacaacaggcaagacgtgtgcttgatagaattgtgggttataaaataagcccattattatggaaaaaggtaaaaccagggctatctgcaggaagagttcaatctgttgcagtaaagctaattgtagatagagaaaatgaaataagaaactttgtaccagaggaatattggaacatttatgctatcttattagatgaaaagtctaacaaggaatttgaggctagattgtatggcaagggaagcaaaaaaatagaattacataaaaaagaagaagttgatgaaatcctagaaaacataaaagatggaaaatacattgtaacagatgtaaaaagaggagagaagaaaagaactccagctccaccatttacaacaagtactatgcaacaagaagcttcaagaaaattaggattcacactaaaaaagactatgtctgttgcacaaggattatatgaaggtgtgaaaattcctgaaaaaggtagtgttggactaattacttacatgagaacagactctacaagaatttctgaagaggcaagagctgctgcaaaagagcaaataagcaaaacttatggaagtgagtattacgaaaataggtattacaaaaagagcagtgaggcacaagatgcccatgaaggtatacgcccaacatatatttatataacgccagagagcataaaagattcacttacaacagaccaatacaaattatatagactgatatacaacagatttttagcaagccaaatgtcagctgcagtatatgatacaataaatgttgatattaaagtaaacgattatgtattcaaggcaagtggtcaaaacctaaaatttaaaggatttatgactctatatgtagaaggaaatgacaatggacaagaggaagcagattcaacatcaattccagcattagaggtaaatcaggaagttaaaaagaaaaaattgaatgcaaaacaaagctttacagagccaccagcaagatatacagaggcaagtttggtaaaagagctagaagctaaaggaataggtagaccaagtacatattctccaacaattacaacaatattggaaagaagatatatagaaaaagagaagaaacaattagttccaacagaactaggagaagttgtaaacaaattattaacagaaaactttggagatatagtagatgttgaatttactgctaaggtagaaaccgaatttgatgaagttgcatctggaaaagaagaatggaaacaaatattgcgtgatttctatccaccatttgaaaatgagcttgaaaaagttgataaagagctagaacatgtaaaattagaagatgaagtttcagatgtacagtgtgataaatgcggaagaatgatggtagtaaaaatgggaagattcggcaagtttttagcatgccctggttacccagagtgcaaaaatgtaaaaccattcgttgtaactatagatgaaccatgcccagtatgtggtggaaaagttcaagttagaaaaacaaagagaaaaagaaactactacatatgtgaaaataatccaaagagctgtaattatatatcttggaataagcctaaaaaaggagaggtttggactccagaagaagtaaaagaagaaggcagtacaactactaagagagcaagaaaaacaacaaaaacagcaaaaacagctactaagaaagcaacagtgaaaaagaaaactacgaaaaaaactacaacaaagaaggcaactgtcaagaaaaaagaataa

SEQ ID NO: 2873 - DNA, 948 bp, Unknown
  Unknown gut bacteria
atgatagaatttgaaaagccaaatattaaatgcttagaaatggataacaatacaaattatgctaaatttacatgtgaaccacttgaacgtggatatggtattacaataggaaattcattaagaagaatactactttcttcacttccaggagcagcaataacatctgtaaaaatagatggagccgctcatgaatttactacaataccaaacgtagttgaagacgtaccagaaataatagtaaacttaaaaatggtaagaataaaaatagttgatgacgagcctaagactctaagaataaacttccaaggagaaggcgaagttacagctgcaaatattgaaactgatggtacaattgaaatattaaacccagacttgcatattgcaactgtttctgaaggtggacatctaacaatggaaatgacagcaaatcgtggcagaggatataacaatgcagaaaagaacaaaacaccagatatgccaataggagttattccaatagattctatatatacacctgtaaagaaagtaaattatgcagtagagaatactagagttggtcaaatggttgatttggataagcttacaatagaagtatggacagatggaagtttaaaaccatatgaagcattaagcttagctgcaaaaattatgactgaacacttagaattatttattgacttatcagaaataagcaaaaatactcaagttatggtagaaaaagaagagtctaagaaagagaaagtattagaaactgcaatagaagatttagagttatctgctagatcatttaactgcctaaagagagcaggaatatctacagtagaagacttaacaaatacgactgaagctgacatgatgaaagtaaaaaacttaggtaaaaaatcattagatgaagtaacaagcaaattacattcattaggattagacttcgctagcaatgaagaataa

SEQ ID NO: 2874 - DNA, 738 bp, Unknown
  Unknown gut bacteria
ggcgtccctattgggcgaaaagttgccgagaaagggcgaagagaggattttaaaatgatagagtttagaaatgtttctaaagtatacgatactggcacagaggctgtacacaatgctaattttactattaataaaggagattttgcattcttagttggtagttctggttctggtaagtctactttaataaagttaattttgaaagaggaagagccaacttctggacacattattattaatggaaaagatactactttcttaaagcctaagagagttccatatttaagaagaagtatgggtgttgttttccaagatttcagacttttaccagataaaactgtttatgagaatgttgcttttgcaatgtatattgtaagggctacaccaaaacatataagaagacaagtgccaatggttcttgcaatggtaggcctttcagataaagcaaatgtatatccaaatgagttatctggtggtgagcaacaaagagttgcacttgctagagcactagtaaacaatccatcaatgttaattgcagatgagcctacaggaaacctagacccagatacagcttgggatattatgagacttttaaatgaaatcaatttaagaggtactactttggttgttgcaacacatgcaaaagatatagtagataaaatgaacaaaagagttattcgtatagaaaacggaaatattataagtgataaaaaaggtgggtatgacagtgaagcatag

SEQ ID NO: 2875 - DNA, 726 bp, Unknown
  Unknown gut bacteria
aaaagtaagaggaggaaatttaagttggatacagtatattcagagaacaaccacattataatggtgggaaaagtaacaagtgacaaaagatttagtcatgagatatatggagaaaaattctatatatttgatttaagtgttccacgtctaagtggaaattctgatattataccaatcacaatatcagaaagattaatggtaaacggagagttaccaatcggaacaaaaataacagttgaaggtcaatttagatcatacaacagttatggagaaggtaaaaacaaattagttctaacagtatttgcaaaaaatgtaacattgttagaagatcaagaaagtgaagtagaagcaagaaaagatttcatatcaaacgaagtaacattaataggttatatatgcaagaaaccagtttacagacaaacaccatttggtagagaaatagcagatatactattagcagtaaacagagcttatagtaaatcagactatataccatgtattgcttggggaagaacagctagattctgtgagaacatggaagttggaacagaagttaaattagtaggaagagttcaatctagacaatacgaaaagaaacatgaagatggaactgtagaaaataaagttgcatatgaagtttctgttggaagcttagaagttgttaatcaaaaagacgatggcgaagctgaagaagctccagtagaagaaaataaagaggctatataa

SEQ ID NO: 2876 - DNA, 513 bp, Unknown
  Unknown gut bacteria
gtgaattataaaatggcaaatgagaaaacaatagcaaaaaaacaagcacaagttgacgaattagcaaaagtattaaaagatgctaaagttgtattattaacagattacagaggaattacagttacagacgtaacaaaattaagagctgatttaagaaatgcaaatgcagaatataaagttataaaaaataacattataaaaagagcattagatgcaaacggagaatcagcattagacgaagctttagaaggaccagtagcattagtaattggaaacgaagattacttagaaccatctaaagtaatatataactttacaaaggatcatgacttctacaaaataaagggtggagttatagaaggtaaagttatgactgcagaagaaataataacactagcaaaattaccatcaagacaagaattacttgcaaaacttgctggagcattgcttggaaatattacaaaacttgcagttgcattggatcaggttaaagaccaaaaagctaacgcttaa

SEQ ID NO: 2877 - DNA, 807 bp, Unknown
  Unknown gut bacteria
atggaggattctatgggagaggttatagtaataacatcaggaaaaggtggagtaggaaaaacaactacaacagcaaatcttggttctgctcttgccctaaaaggaaaaaaagttgtattagtagatactgatattggccttagaaaccttgatgttgtaatgggactagaaaacagaatagtatacgatatagtagatgttgttgaagaaaaatgtaaactaagacaagcccttataaaagataaaaggtttgaacagttattcctattaccagctgctcaaactagagataaaagcgctataaatgaagaacaaatgaaagaactaactagcaaactaaaagaggaatttgactatattataatcgactgtcctgctggaatagagcaaggcttcaaaaatgcaatcgcaggagcagacagagctatagtagtaacaaatgcagaaatatcttcaatcagagatgcagacagaattataggattattagaagcgtctgagattagaaatccagagctaattgtaaatagattaagaccaaacatggttaaaaaaggagagatgatggatgttgacgatattgttgacttactatcaatcaatcttttaggtgttgtgccagacgatgagtttataattactcaaacaaataaaggagaacctgcagtaataaacaaaaaagctccatcaggaaaagcatatttagaaattgcaagaagaattcttggtgaaaatattgatgttacaattccgggcagagatgaaggattttttaccaaaataaaaggcatattcagaaaaaaatag

SEQ ID NO: 2878 - DNA, 1323 bp, Unknown
  Unknown gut bacteria
ttgtttaagaccataaaaaatgctttaaaaacacctgaagtaagaaaaaaattattatatactttattgttaatagtaatttttagattaggctgttatataacaatacctggagttgatactttcacattagcagaagaaatgagttctgcaactaatggtgtaacaggacttatagacacaatatcaggaggagctttctcaagactttctatatttgcaatgtctataactccatatatcacagcatcaattgttatccaattattaggaatggttataccagcattggaaagattaactaaggaaggtggagaagagggaagaacaaaaattaataagtatacaaaaatacttacaattgttctagctttaatcgaaggattaggaatattcttctcatacaaatcttctggaatattcttagatacaagctttatgggaggagcgttaacagttatttctttaatggcaggaacagcacttttaatatggcttggagaacaaattactaataaaggtattggaaacggaatatcaatgataatatttgttggtattatatcaggattaccaagaggcattacagctgtatggggcttaatgttctcagctggaactttcagcacagttggatttataaaagctttggcacttatagttggattactagtactagttgcaggagttgtatttatacaaattgctgaaagaagaataccagtacaatatgctaaaaaggtagttggaagaagaatggtaggagctcaaaatacacatattccattaaagctagcaatggctggagttatgcctattatatttgcttcatcattcatgacattccctgcaatgattttacaaatatttgtaaaagatattgcaacacaaacaggattctgggcaggagtatatagattttctattgcttcatcaaattctagtgtgggaataggatatacaattgcaaacgcaatagtatatttactattaatattaggattcacatatttctacacatatgcgatgttcaatcctgctgagatatcaggaaacatcaagagaaatggtggatttataccaggtataagagctggaaaaccaactacagattatttatcatctgtaatatctaaactatcattagtaggaggaatattcttagcaataatagctattcttccaatgatagcaaactttacaaacttaaacatagcatttggtggtacatctatacttatcgtagtaggtgttgcactagaaacaatacaacaattagaatctcaacttgtaacaagacattacaaaggattcttagaataa

SEQ ID NO: 2879 - DNA, 435 bp, Unknown
  Unknown gut bacteria
atgaataatacaacatatagtattaagaaagatgaaatagaaagaaaatggtatataattgatgctgctaacaagccattaggaagagttgctgcagaagctgcaaaattactaagaggaaaacacaaacctacttatacacctaacatggatgctggagatcacgttattatcataaactgctcagaagtagttttaacaggacataaattaacacaaaaaatttacagacaccattcttcatacattggtggaatgaaagaaatccaagctaaagatatgttagctaacaacccagaaaaaatgatgactttagctgtaacaggtatgcttccacacaacagcttaggaagacaaatggctaaaaagttaagagtatatgctggagctgagcatgagaacatggctcaaaaaccagaaatatggaatttttaa

SEQ ID NO: 2880 - DNA, 1290 bp, Unknown
  Unknown gut bacteria
atgatagacattaaatttttaagagaaaatccagatgctgtaaaacaaaacattaagaataagtttcaagaccaaaagcttcctttagtggatgaagttattgctctagataaagaaagtagagcctgcaaaatgcacggagatgagcttcgttctaagagaaaatctcttagtgataaaattggtagccttatgaaagaaggcaaaaaagacgaagctgaagctattaaaactgaagttaaagctattaatgatgagcttgttgtaaacgaagaaaaagaagaaaaatttgcaagtgaaatcaaagaaagaatgatgaaaattcctaacataatagatccatcagttccaatcggaaaagacgattctgaaaatgttgaagttcaaagatttggagaacccaaagttccagattatgaaattccatatcatgcagatattatagaaaaattaaacggaatggataaagaatctgcaggacgtactagtggtgttggtttctattatttaattggagacattgctagacttcatgaagcaatgcttgcatgtgctagagattacatgattaatgctggtttcacatatgcaattccaccattcatgattcgtagtgatgttgttacaggtgttatgagctttgcagaaatggatgccatgatgtataaaatagaaggcgaagacctatatttaataggaacttcagagcattcaatgattggtagatttaaggaccaaattttaaagaaagcggatcttccaattacaatgacatcttattctccatgttttagaaaagaaattggttcacacggcctagaagaaagaggattataccgtgttcatcaatttgaaaagcaagaaatgattgttttatgcgaaccagaagattcaatgaactggtacaataaaatgtggaagttaagtgtagacttattcagaagttggaatgttccagtcagacaacttgattgttgcagtggtgatttagctgatttaaaagtaaaatcttgcgatattgaggcatggagtccaagacaaaaaaaatacttcgaagtttgtagctgttcaactttaggagatgctcaggcacgtagattagggattcgtgtaaagggtgaaaaaggaaactactatcctcacactctaaacaatacagtagtcgctactcctagaggacttatagcagttatagaaaataactacaacgaagacggaagcataacagttccagaagttttacgtccatacatgggtggaacagaaataataaaacctaaaaataaataa

SEQ ID NO: 2881 - DNA, 2616 bp, Unknown
  Unknown gut bacteria
atggcagaatactcaccaatgatgcaacactatcttgctacaaaagaaaaatataaagattgtatattgttttatagattaggggacttttatgagatgtttttcgacgatgcagttaatgtatctagagagcttgaacttacactaacaggaaaagactgtggacaagagcaaagggctccgatgtgtggaattccgtaccatgcagcagaatcatatattgcaaaattagttcaaaatggacataaagtagcaatttgtgaacagttagaagacccaaaacttgcaaaaggaattgttaaaagagatgttataagagttgtaacaccaggaactgtaacagagtctaatttactagaagaaaaaagaaacaatttcataatgagcatattcaaaaaaggaatatttttcggaatagcagtttgcgatatatcaacaggagatttctattcggcagaaataaaggaagaaaataattttgagagattattagacgaaatttcaaggtattctccatctgaaataattgcaaacgagatgttgtatgattgtgtggaagaaataagcaaaataaaagaacgttttgatgtatatatttctactgaagatgaggaaaaatttagcgaagaaacagaagaaatatatatgcaatatgcgcttagtgatgataaaggaaacatcataaaagacctagaaaaaagaccatttgcagttgctgcaataaatggacttataaaatatattgaagatactcaaaaaacgaaattagaacatatcaacaagattacaatttatacaatcacgaaatatatgtctttagatataaatgcgagaagaaacttagaacttacagaaaaaatgagggacaagtctaaaaaaggaactcttctttgggtattggataaaacagcaacatcaatgggaggaaggcttttaagaagatggatttcagatccattgatagatgtaaaagaaataaataacaggttagaagcggtaaaagagtttaaggacgacattatattaagaggagaactttcatcaagcttaaaaggtgtatatgatatagaaagactagctggaaagatatcttatggaagtgcgaatgcaagagacttaaactcactaaaatcatctgcaagtaagttaccagaaataaaaaatatgcttgcaaatgctaagtctggaatgcttagaaaaatatatgatgacctagatacattagatgatatcttcaaattaatagacaaagcaatagtagacgaaccaccaatattaataacagaaggtgggatcataaaaatgggatatagcccagaaattgatgaactaaaaactgctatgatagacggcaagacttggctcgtacaattagaggcaagagaaagagaagagactggaataaaaggtttaaaagtaggatataacaaggtatttggttattacttagaagtaacgaaatcatatttatcacaagttccagacagatatataagaaaacagactctaacaggtggagaaagatatattacagaagagttaaaagagcttgaaagcaaagttttaggagcagaagaaaaagttgtagcactagaatacaaagctttttcagaaataagagaacacataaaatctcaaatacaaagattacaaaagtctgcaatggcagtatcacaattagatgttttatgctcatttgcacaagttgcagaagattttaattactgtatgccagaagtagatgatagtggaattatagacattaaagatggaagacacccagtaatagaaaaaatgttaccaagtggagcgtttgtggcaaatgacacatatcttgataaagagtcaaacagagtctcgataataacaggaccaaatatggctggaaaatcaacatatatgagacaagtcgcattaattacattgatggctcaaattggttcatttgtaccagcaacatcggcacacatcggagtagtcgataaaatattcacaagagtcggtgcatctgatgacctaagtatgggacagagtaccttcatggtagaaatgatggaagttgcaaatattctaaaagaagcaacggcaaacagcttggttgtactagatgaaataggaagaggaacatcaacatatgatggactttcaatagcttgggcagttgcagaatacatagaaaacaaagaaaaatgcggagcaaaaacattatttgcaacacactatcatgaattgacacaactagaagatacactagaaggtgtaaaaaattattcgattgctgtaaaagaaaaaggagaggatataattttcttaagaaaaataattccagggggaacagacgaaagctatggtgtacacgttgcacgtttggcaggagttccaaaggcagtaactcaaagagcaaatgagatattaaagaaaatagaaagaaaaaatgtgcttgtaaacaaagcacaagaaaaagaagataaaaagcaagtatcagggcaattagatttatataatttcaaacttgcagaaatagcacacgaattagataaagtaaatgtaaatgaactaactcctatagaggctctaaacacacttgttagaataaaagaagaaataaaaggataa

SEQ ID NO: 2882 - DNA, 2748 bp, Unknown
  Unknown gut bacteria
atgggattatttaaaacatacagtgaaaaagaagtaaaaagagtaaggcctattgttgagaaaataaacagtttagagccagctatgaaggaattatctgatagtgagcgagttgcaaaaactccatactttaaggaacaattggaaaatgggaaaacattagatgatatcttgccagaggcatttgcagttgtaagagaagcatcaagaagagttttaggaatgcgtcatttcgatgtacaattaattggtggtattatacttcatcaaggaagaattgccgaaatgaaaacaggtgaaggaaaaacacttgttgcaacactcccagtttatttaaatgcacttacaggagaaggagttcacgttattactgtaaacgattacctagcaaaaagagatagcgagtggatgggaaatctttatagatttttaggactttctgttggtcttgttattgccggaatgaatccaaagcaaaagcaagaagcatatgcatgtgatgttacatatggtacaaacaacgagtttggtttcgattacttaagagataacatggttatatacaagaaccaattagttcaaaggaaattaaaatatgcaatcgtcgacgaaatcgatagtattttaattgatgaggctcgtacgccacttataatttctgttagaggagcacaatcttctaacttatatcaaaaagctgaccattttgtaaaaaaattacaagctaaagttataattgaagaagacgacaaagattatgagcaagaagaagataacgaaaaatatgattatatagtagatttaaaggctaaatctgcaactcttactcaacaaggtataaagaaggctgagcaagaatttggactagaaaacttcaacgatttagagaattctgaattagttcatgatgtaaatcaagctttacatgcaaatggaataatgaagaaagataaagattacatcgtaaaagatggacaagttctaattgtagacgagtttacaggaagaattatgtatggaagaagatacaatgacggattacatcaagcaattgaagcaaaagagcatgttaagataaacgatgaatctaaaacacttgccacaattacattccaaaactactttagaatgtatgaaaaattatctggtatgacaggtactgcaatgacagaagagtcagaattccaagaaatatacaaattggacgttgttgaaattccaacaaataagccaatgattagaaaagacaattcagacataatatataaaaatgaagatgccaaatttagagctgttatagcagacatcaaaaaagctcatgaaaaaggacaaccagttttaattggtacagtatctattgataaatctgaaaaattaagtaaattacttgataaagaaggaattcctcatgaagtattaaatgctaaataccatgagaaagaggctcaaattatagcacaagctggtaaatttggagctgttacaatagcaacaaacatggcaggacgtggtacagatattatgcttggtggaaatagcgaatatcttgcaaaacaagaaatgagaaaactaaaatacactgatgaagaaattgaagatgctgcagctcataacgagacagatgataaggcaatacttgctgcaagagaaaaattcaatgaattagagaaaaaattcgataacgaaataaaagaagaaaaagaaaaagttattgaagcaggcggtttaaagataattggtacacaaagacacgaatcaagaagaattgataaccagcttcgtggacgtagtggacgtcaaggtgacccaggagaatctagattctacattggattagacgatgacctaatgaaaatcttcggtggcgacattgtaacaaaagtctacaatactttaggtgcagacgaagatatgccaatagaaagtagattaatttcaaaggctgttgaaaatgcccaaaagaaagttgaaggaagaaacttcagtataagaaagaacgttctacaatatgacgatgtaatgaatgttcaaagaacagtaatttatgagcaaagaagagatgttttagacggcatgaacttaaaagaaagcatactaaaaatgatggattctgttgttgaattaatagtagattctcacatagtagacggagaagaagtaaacaaagaatcaattgctcaagacatagaaacaaacttaggaataagtgatgtagctgcattaaaggcagaaaaattcgacagaaatgccttagtagacgaattaatagcaaaagtacacgaaatatatgcttctaaagaaacagaatttggtgaggaaaatttaagagaacttgaaagagttgtaatgcttaaaatagttgaccaaaaatggatggatcatatagacaacatggacgaattaaagaaaggtattggacttcgtggatatggacaacaagatccagttgtacaatacagacttgaaggaacagaaatgtttgacgatatgatagaagatataagaatggatgttgtaaaaatattgctaaacattcgtaaaaaagaaggtccaatagaaagaacagaaacaacaaaagtaacaggagcaagccttgaagatacagcaatcaacttagttgatggaaatatatcagaaaaagaaggcggaatgaacaaaacagttgtaaatgaaggaccaaaagttggaagaaatgatccatgcccttgtggttcgggtaaaaagtataagaactgttgcggaaagtag

SEQ ID NO: 2883 - DNA, 1440 bp, Unknown
  Unknown gut bacteria
atgaaaagtttaagaaaaactaaaattgtaggaacaataggacctgcttctgaaaacagattagaagaattattcgatgcaggattaaatgtttgtagagttaactattctcacggaagctgggatgagcaaaaggaaaagactgaagcaatattaaaaataagagaagaaaaagatcttccaattgctttattattagatacaaagggcccagaaattagaactggaatgctttatacaggaaaaaatacaaaaattcaattaaaagatggacaaaaattcacattatataacgaagatgtaacaggaaacgaagaaggagtttctgtaacatacaaagaattatacaaagacgttgtgccaggaacaaaaatattaatcgatgatggtgcaatcgaattaaaagttgacgaagttgttggaaaagatataataacaacagttgtacatggaaatggcttaggaagcagaaaaactatgaacttacctggaacaataataagattaccaggtcttgctgataaagacatagcagatttaaaaacagcatgtgaacatggttatgattacattgcattatcttttgctagaaatgaagaagatataaagaatgtaagaaaaatactagatgaaaatggtggaaaagatattcaaatattaacaaaagttgaaaatgttgaaggtctttctaacttaaatcaaataattgacttagcagatggacaaatgatagctcgtggtgatatggctacagaaacagatttcacagaaccaccagtagttcaaaagaaaataatcaaactttgcaacaaagagtgcaaaccagtaataacagcaacacaaatgctagaatcaatgacacatcaaccattaccaacaagagctgaagcaagtgatgttgcaaatgctgtatatgatagaacaggtgcaataatgctttcaggagaatgtgcacaaggtgattacccagtagaatgtgttaaaacaatggttaaaatagcaaatagagttgaaccagaagttaactactggaagagatttgacgaaaatgatgatgttgaattagatacattagcaaaaaatgtagcttatgctacatgtgtaacagctaaaaacatgaaagcagatgcaatagtatgttatacacattcaggaagtacagcaagaaacttagcagggcttggagcaggttgcccaatacttgctataacagacaataagagaacattccatcaattaggtttagtatggaacgtaacaccagtatttgttgatgctaaagaaacaataaacaaaacaatagaagcaggtattgaaaaattaaaatcaaaagaaatactagaaaaaggtgacttagtaataatagctggtggagaccaaataatgaaagatacagaatcatcagtaaacaaaacactaggtggagtattaagagtataa

SEQ ID NO: 2884 - DNA, 1581 bp, Unknown
  Unknown gut bacteria
atgttaattgcaagtggcgtaacagtcagatttgggaaaagaacactttttgaagatgtaaatataaaatttaataaagggtgttgttatggaattataggtgcaaatggagcaggaaaatcaacttttttaaaagtactttctggagaattagagcctagtaaaggagaagttactaaggaaaagactgagagaatttctgtattaaaacagaatcactttgcttatgaagatgaaacagtaatggatactgttataatgggtaaccaagagctatacaatataatgaaagaaaaaaatgaaatatatgctaaaccagatttttctgaagaagatggaatgaaggctgcaaaattagaagaaaaatttgcagaactagatggttggaatgctgaatctgatgcagctattttgttaaatgatgttggaattgatgcagagaaacattataaatatatgagagaacttgaagcaaaagaaaaggttaaagtccttttggcacaggctctatttggcaatccagatattttattattggacgagccaacaaatgatttggatttgaaaacaataaattggttagaggaatttttaattaattttgaaaataccgtaattgttgtttcacatgatagatattttttaaataaagtttgtacaaatatagcagatgttgattatggtaagataaaggtgttccctggaaattatgatttctggtatgagtctagtcaattattgcaaaaacaaatgagagagcagaataagaagaaagaagagaaaataaaggaattacaagcatttattgcaaggtttagtgctaatgcttctaagtctaaacaagctacttcaagaaagaaatcattggaaaaaattcaattagatgagattgtaccatctaatagaaaatatccttatatagattttaaaccagatagaatgccaggaaatgaaattttacaagttaaaaatatttctaaaacagtcaatggagaaaagattttaaataatgtgtccttcactgtaaagccaaatgataagattgctattgtggcagataacgaaaatgctaaaactgttctttttcaaataattgctggtgagatggaacctgatgaaggcaaaattatatggggaactacgattacaaataattattttccaaaagataataattatttattccaaagtgatttgtctataactgattggcttagacaatattctaaagatccagatgagacttatgtaagaagctttttaggaagaatgttattctctggagaggaagctttgaaggctgtaaacgtattgtctggaggagagaaggttagatgtgttcttgctaagatgatgctttctggagcaaatttcttaatcatggatgagccaactaaccacttggatatggagagcattacagctttgaatgatggaatggttaaattccctggaaatatgatatttacatctcatgaccatcaattaatgcaaactgttgcaaatagaattattgatataaaagaaaatgaggttatagatagagaagtgtcatatgatgaatacctaggtattgaataa

SEQ ID NO: 2885 - DNA, 2340 bp, Unknown
  Unknown gut bacteria
atgccaaggaaagtagtaaaaggtacaacagaaaacttaaatatgttaagagagaaggtagactatattggttttgaactaggagaagttccagaatttttaaaggattttgagccacttgaatatagagtaccaaaggtttacgacgaaactacatataaagtttataagtacgtaaaaataaaagatattgaaatattaattacaccaaaggacagactagatgatttagaggaaaggtataaacttgccagcccattatttacatatatgaagccagaggcaaacgaaaatcttgaaaagtatgcatactttttaaaaatgataaatcagactagggtgtcagatattcaagaaatagaaaaggaacaagaggcttttcaaaaagaaattccatttgatgtgaaatttgctaataattttaagtggcaaatattctattctgattatgcggataaatattttatgcttgcttctacaaacgaaacagataattcgccgatgttttatttattgaaaaaaaagattgaagcgtgcaagagcaagagtgaaaaggataacactatttttgtgcctatcagtaatgaggaatattcggaagtaatattaaaaaaatcagagatagaagatttagaaaattacttgtggtttttcactaaaaattggccttctatatatgaaatagaagacgaagaaggaaatattcagttgcaaatagttggagagactgttatatatgataaaatgacaagccaatatagaattattctcaaagataaaaaagaagcttcaaaatgttataaattaataaaagcattattcattttagcatatgatttaagaaaagattatcaatttcaaataaagattggtgaaaatggtggcttagaattttattataatgatgaaaaaattgaatatgatactttgccagagtttttgaagaaagagtcaatttctaagataaaagaaaacgaaagagttaagactgagactaaggaagtaaaggcagatatcaaagatttgcaaaagcaagaagaacagaaaaacctagaatatcttagaaaagagaaagagattgttactttcttagagtgcaagaaaacttttatgggaagaataaagtatttctttaaaggaaagaaaagtaagaaagaggaagaagtttctgaacattctgcaagtaaagaaagattaaaggacattttaagtcaagataaagaaaatatagaacattttaaagatgatgaattagaatctaagagctatactgtagaagatattattaagattggcaaagaacttgataataatgtaaaagataataaaaatgcaaaactagacttaaaagctttacaaaataaggttgataatattgataaaaaattaaagaatgcaacagagtttttagaagagatagatgagcataagaagagtatattcgaattttggaaatatgcaaacaaagatgagtcgaaaatgcttgccgaaggtgaagtagaagaggaagaaacagcgagtacaggacttagaaaaacatttgattatgaagaagatatagaaaattttgcaagtaagatagatagccaacaaagagaaaaattaacacataaagaacaagatgcattgtttgcatcaaattttgtactagatggaataaacatagtatcgaaggaaaagctattaaaagcagatgaaacaaaaatagcaaatttattgcagcaattaaaagacgactacaagaaagatattgataaaattcaagaaaaggatttcgatatttttggaaatatcagccaagataagacaaagataaaaacattaaaaaataatcaacatagagaagcggaaaaagataagtacaaagttttaaatgtaaatttaaatacagagatggacgtatttatagagaaattaaaagaacttagacaaattcttatagatgaatctgaaaagatagaagttccatatgatatatctttgtacaaggctagcaacgaaaagattgatccagatggatttgacaaatttagtgtaaatccattcgaaactttggataatctagaaaaaacttctacatctaaagaaacgtatttatataaaataaacgttccagaaaatacaaagttagtattttactcgaatataacattctttgaaaataataatcaaacacttcctttaggaatggacatatctcaagaaggacttataaatatggataaatataagcttgagctaaaaggaaaagatgaatttaatataaatattttcaagaatgaatttgataattttgtaaagaatgtgaaggtgtatgagtataatttgacaagcaaataa

SEQ ID NO: 2886 - DNA, 2601 bp, Unknown
  Unknown gut bacteria
atgttaaagttagagaatattaataaagattatatatctggtgatacaacggttcatgcactgaaaaacataaatattgaatttagagagagcgagtttgtatctattttagggcaaagtggtggaggtaagaccacacttttaaatataattggaggtctagacagatatactagtggagacttgattattaataataagtctaccaagaattttaaggatagagattgggatgcttacagaaattattctgttggttttgtttttcaaaattacaatttaattccacaccaaacagtgcttgcaaatgttgaattggcgctaactttatctggtgtaagtaagaaagaacgtaaacaaaaggctattaaagcattagaagatgtgggattgaaggagcaaatacataaaaagccaaaccaattgtcaggaggacaaatgcaaagagttgctattgctagagccttagtaaataatcctgatataattttggctgatgaaccaactggtgctttggatactcatacttctgtacaggtaatggaaatattgaagaaaatatcgaaagataagcttgtaataatggttacgcataacccagaacttgccgagaaatactctacaagaattgttagaatacttgatggaactattatgaacgattctaatccatatacgagtgaaaagaaggaggctgaaaaatcaaaggaaaaacgcagaacttctatgaaatttttcactgccttaaatttaagtttgaacaatttaatgactaaaaaaggcagaactattttaacttcgtttgccggaagtattggaataataggtattgcattgattttagctttgtctaatggaatacaaaattacattgacaaggtagaagaagatactctatcatcatacccaataacaattgaggagtctacaatagatacgtctgcaatgatagaaaaaatgatggacgaaaacaatgaagaagaggatagaccaaaagacaagatatattcaaaaaatataatgtctgagatgatttcgactctatctaataaaatggaaaataataatttaacagagcttaaacattacttagagcaagaagataacgacattgctaaaaacagtaatgctattcaatatggatacaatttaaatctaaatttatataaagaagatacatctaatggcgtagtgcaagtaaacccaagtactgtaatggacagcatgggaatgggaagtatgagagaggcacaagagaattctccaatggcaatggtatctagctcatttagcactatgaacaatgatgcttggacagaaatgctagacaacgaagaattgcttcattctcaatatgatttaattgcaggaagttggccaaagagctataacgaagttgttttaatagtaaatgaaaacaacgaattgaacgattatgtgctatatactttaggactaaaagaccaagaagaattatcaaaacagtgggaaaaggctaaaaaaggagaaaatgtagacaaagaagaagagactacatattcatatgatgaattattaaaattatcatttaaactaatattaaactctgattattatgaaaaacaaggaaatttgtggatagaccagagtgaagataatgactttatgaaagaaaaaatagcaaatgccgagaatataaatgttgttggaattattaagcaaaacgagcaaagcactgcaacagctatgaatggcggaataggatatttaaaagacttaaaagaatacgttataaataagacaaaagaagcggacatcgtaaaagagcagaaagtaaatccagaaactaatgtatttacaggactagagtttccaaaatcaggagaaaagtcagaattcaatttcaataatctaagcaacgagcaaaaaatggcaataagccaaatgtcaacagaagaaattgcaaaagtaatggacacatacacaaaaaatcagaatgcaagttatgaaaacaatctaaaaacattaggagcaattgacttagataagccatcatcaatatcgatatatccaaagacttttgaaagcaaagagttaatagcaaaagcgatagaggactacaacaaaaaacaaagagacgacggaaaagaagaaaatacaataacgtacacagacttagttggagcaatgatgagttcaataacaaacataatagacgccgtaagctatgcactaatcgcattcgtaagcatatcgcttgtagtatcatcaataatgataggaataatcacatacatttcagtattagaaagaacaaaagaaataggaatattaagagcaatcggagcatcgaaaaaagatatctcgagagtattcaatgcagaaacattcataataggtttaatatctggaatgataggcgttggaataaccttgctattaaccttgccaataaacagcataatatatgcactatctggagtagcaatacatgcaacagtttcagtaacacaagcaaccgtactagtattaataagcttaggcttaacaatacttgcaggactaataccagccaaaatggcaagcaaaaaagacccagtagaagcattaagaacagaataa

SEQ ID NO: 2887 - DNA, 1248 bp, Unknown
  Unknown gut bacteria
atgaagcggtacggaattactgttggtgataatataaaactgaacgtaagactggttgattgtgttggatatttggttaataatgctattggatatttggaagatgatatgccaagaatggtaaaaacaccatggtcaacagaggaaattccatttgaacaagcagctgagattggaactaaaaaggtaattcaagaacattctacaattggaatattggttacaactgatggaagtgtgactggaatagaaagagaagattacatagaaccagaggaacgtgttgtaagggaattaaaagaattaaataaacctttcgtaatagttttaaattcggtagaaccagattctgaatatacacaaacattagctcaaaaacttcaagaaaaatacgatacacaggtaattccaacagattgtgaaaatttaactgcagataaaattgatgaaatatttggcaaagtattatatgaatttccaatagaaagagtaaacatcagttttccaagatgggttgatggactaccagaaacacattggctaaaagaagaattatatgacgaaatcaaagatgcgtttaaagacataaggattctaaaacaaatagacaacagaataaccaaattgcaaaatactgaggtaatatcaacaagtataataaacgaaatacagctaggaacgggaagcataaacataaccatcaacttattagatgacttattctataaggtattaaccgaaatttctggggttccaataacaaacgaaggtgaactattctctagcatgatatcatttgcaaatgtaaagaaggagtatgacaaagtatctacagcattgcaagaagtaaacacaaaaggttatggaatagtaagcccatcaatagacgaattaatattagaagagcctgaaatggtaaaacaaggcacacgctatggagtaaaactaagagcaaaagcaccatcaatacacatgataagagcagacatagaaacagaagtatctccaatagtaggaagtgaaaaacaatcacaagaactggtagaatcgttactttcagaatttgaaaacgatccaaagaaaatatgggaatcaaatatatttggcaagagcctgcatgagctagtaaacgaaggcttgcagacaaaactaatgaaaatgccagaagatgcacaagaaaaattgcaagaaacattggaaagaataataaacgagggaagcggaggactaatctgcataatattataa

SEQ ID NO: 2888 - DNA, 957 bp, Unknown
  Unknown gut bacteria
ttgtttttaattgttgttataatacgtttatttaaaaaatttccaaattcagatataattgatatttgtgaagttactggaggaaaatttcttaaatggctagttggttcaatttttgccctatatataattgttacatcctctttattgcttaggtattttatagaaacaattcacattatttattacggagatgctccaattatttatttgctacttttctttttagtagtgggtgttattgccaatatgcaaggaataaaaagtattgctagaactaatgttattttatgtgtaattatggtaataagcttattaaccgcttttgcagccgtagttcccaatatgacaattcagcgtatttttccaattttaggtcatggggtttctaatacttttttcactggtatttcaaatatttttatatttaatggtttttctattttatttttagtaccaccactactcgaaaacaaaaaagattttaaaaaatcgaccttaattgcaacattaatctccatttttattgtaatacttgcaactgctagtatgcttttagctttttcttttagcacagacatagaccgtatttcgccactttattcactattatcaaataacgaatttggtaaatactttcaacaccctgaatctttatttatatttacttggattttatcatttatgagttactttaacattggattaatgacttcatcattagtctgccaaaaagttactaatgtaaaaaactcaacaccttttataattcctatttgtataattagtttgataattgcacttattccaaacagtattatgcaaacacttgcaataaatgattttatatctaaatatattggaacaccattaacttttatagtatttccaattattcttatgattgctaatttaaaattaaagaaaggaaccaataccaatgagaatttggattaa

SEQ ID NO: 2889 - DNA, 1068 bp, Unknown
  Unknown gut bacteria
atgagtttagaaaacagtgaaaagaaaaaagcactagaatcagcattaggtcaaatagaaaaacaatttggaaaaggctctgtaatgaagcttggagattttacagcaatgaatgtagaatctataccaacaggagctttaagccttgacgttgctttaggaattggtggaattccaaagggaagaataatagaaatatttggacctgaatcttcaggaaaaacaactcttgcattacatatgattgcagaatgccaaaagagaggcggagaagcagcatttatagatgctgagcatgcattagatccagtttatgcaaaacacttaggtgttgatatagataatttgatagtttcacaaccagatacaggagagcaagcacttgaaatagcagaggctcttgttagaagtggtgccatagatattatagtagtagactctgttgcagcacctgttccaaaggctgaaatagatggagacatgggagatgcacatgttggtcttcaagctagattaatgtcacaagctttaagaaaattagctggtgtattaaataaatcaaatactgcaatagtatttataaaccaattaagagaaaaagttggaataatgtttggaaatccagaaacaactgcaggaggaagagctttaaaattctatgcttctgttagattagacataagaaaaacagaaaacttaaaacaagatggagaggtatttggaaacagagtaagagtaaaagttgtaaagaacaaagtcgctcctccattcagagaggctgaattcgatatcatatatggaaaaggaatatcaaaatctggaaacatactagatttaggtgtaaacttagaaatagttgaaaagagtggctcttggtttgcttatgacggaacaagaattggacaaggtagagaaaatgctaaaaaatactttgaagaaaaccctgaaataatggcagaagttgagaagaaagtaagagcaaaatttaacgaagcattcgaaaagagcctaagcgacgaaatggaagtagatgctgaacaggaaacagaaccaactgaagaagagtaa

SEQ ID NO: 2890 - DNA, 804 bp, Unknown
  Unknown gut bacteria
atgaaaagagttttatcagcagcagtattattaccattggtacttatagtgtttattttaggaaatacatatgtggtagacgtgtttatgggaatagtagctttaagatgtatatacgaactattccatgcgtttgaacaaaaaggacatcatccagtaagatgggttggatatttagcagcaatcgcaataatgtttatacatgttataccagaacattatgcaaaatacgctgtaatatcaatcattccaatatctgttttaatcttgttcatattagtacttacgaaaaagacaaaaacagatgtaatagacatagcaattactttctttggagtatgctacattgtattatttttaatgtttatgtcaataattagaaacatggagaatggaaaattcttaatttggtatgtatttatagcatcatggcttacagatgtgtttgcatatttaacaggaaaggcaatcggaaaacatcattttacagatataagtccaaacaagacaatagagggctgtataggtggaacattaggtgcaactctatgtatcattttatatacagtattaataaacaaatttgctggatttaatataaacgttgcagtaatttcattaataggaattgtccttagcatagttggtcaaataggagatttatctgcatcagctattaaaagatatgctggaattaaggattattcagatttaattcccggccatgggggaatggttgatagagttgatagtgtaatatttattgctccatttacatatttattatttatattgatgttttag

SEQ ID NO: 2891 - DNA, 882 bp, Unknown
  Unknown gut bacteria
atgataacagcaagccaagtaaaggaattaagagaaaaaacaggtgcaggaatgatggaatgcaagaaagttttaacagaaacagatggtgacattgaaaaagcaatggaactattacgtgaaagaggaataacaaaagctgctaaaaaggcatctagagttgctgcagaaggattagtaggtagctacatttcagaagatggaaaagtaggtgctatagctgaagttaatgctgagacagatttcgtagcagagaatgcagaattcaaacaatttgttaatgatattgtaaagcaagttgctttaaataacccagctgatgttgaagcgttattagaagaaaaattcatagcagatccagaaaaaactgttaaagaagctttaataaataaaatagctacaatcggagaaaacataacaataagaagatttgttagatatgagacaacagatggaacattaggacaatatgttcatggagctggaaaaatagctgtattagtagaaatgaagaatgcagatgcagaattaacaaaagacatttgtatgcaaatagcagcttctaagccagaattcttaaacagagaacaagttccacaagaaagagtagacaaagaaatggaaatactaaaagttcaagctatgaatgaaggaaagccagaagctatagctgaaaaaatggtacaaggaagaattggaaaattctattcagatatctgcttagtagaccaagaatttgttaaagatatggacaaaaaagttagccaattattaaaagaaaagaatgcagaagttgttagatttgcaagacttgaaaaaggtgaaggaatagagaaaaaagaagaaaactttgctgaagaagttgcaaaacaattaaaatag

SEQ ID NO: 2892 - DNA, 786 bp, Unknown
  Unknown gut bacteria
atgtctgaagatagaaaaagatatttaagaaaaaagaagtttagaaaaattgagatactcgcaacacaaattttaatagtagttgcttttataggaatatgggaacttcttgcaaggcttggaaaaatagatagctttattactagccaaccatctagaatagtaaaaacatttctaaatttgtcatcgaatgatttaggaagacatctaagaattacatgtatagaaacattggtgggattctctttaggaaccataatgggagtaataatagcaataattttatggtggtcgtcgttcatttctaaagtgtctgaaccattcttggtaatactaaatgcactaccaaaagtagcactaggaccagtaataataatatgggttggtgccggaatgccagctataatagttatggcacttgcaatttcgcttattgtaacaatattaaatattttaaatggacttataaacacagataaagaaaaaataaaaatggctgaaacttttaatgcaagcaagtttcaaatacttacaaaaatagtaataccagcaaatatctcaacattattcaacactctaaaagtaaatataggattatcactagtcggagtaatatctggagagttcttagtatcaaaaggaggacttggatatctaattgtgtatggagggcaagtatttaagctagatttggtaatgacaagtgtaattattcttgcgatagtcgcagccgtaatgtacgaaagcatagaaatattagaaaaaattgtgatgaaacagagatag

SEQ ID NO: 2893 - DNA, 3363 bp, Unknown
  Unknown gut bacteria
atggaaagtaatattatagataaacaaatatatgaagatttaataagtcaagttgacgcaaagaagctagatttggcttcaaaattaatgcagaataaagctattgaaataaataagattacatatgataataaacaaaattttgaggttcattccatcgtaaaagatgagaagaatgatgatggaattatagtaaaacagaaacacaaagtttatattaaagttgcagaaggcgagattgaaaatttatcatgtacttgtgatgattacaaggaaaattattgtgcctgtgaacatattattgcaactgttaaagaatttgcgagtaactctgactatgtaagaattttttctggagagagaaaagaaagtagaagtacagatacggttaaagaacgtggggaaaactacaagattttcaatcaactagtaaatgaattttacagaattaatgaagaagaggaagaacagaatacatcttcaggcaaggaggaaggattcgttcatattgagccaaagattatatgtagtagaacaaataatagcttgaaactagaaataaagctttctaaaaaagatgagaagcagggctataaggtaaagtctttaccagaattttatgatagatttgcaagtggtgaaaagtataaatatggagcaaaacttgagtttgcacacacaagagaaaaatttgtggaagaagacagaaatcttttagattttgtacttaaatatgcagaaataataaaatatgctaatgaatcgtctacaggatatgactactacaccaaaagaatgggagaagatgcaatagttatttctaacacaggtttagatgatttatttgaatgcctgaaaaatagagcaatttcaatggaagaccagtttggaactgatgctgttgttttggtaccaaatgagccagacattaagtttaaattagaagaaaatgatgatggagaatataagataactgtaaatgtggatatatatgcgtatatggtttatgagggcagaaaatatacatatttaatgcttgataagaaattatacagatgctcaaaaaaatatagcaatactgttattaaaatgttggaagtatttagaaagaattttacaaaagagattttgcttccagagagccagttgtctaatttcttctctatagtacaaccaagcataaaaaatagtgttaatattggagaaaatgagtacaagaaagttgaaaaatacattcctgcagagctatatgcaaaattatatttggactacaatgacttaaattatgtgctagcagacattagatttatatatggagatgtagagataaatccgctagattctaagaaacaagtagaagtgctttctagaaatacaataaaagaaagcaaattaattaacatgttcgttaagagtggattcatgttagaccaaaagaacaatagattgattcttgcaaatgatgacaagatatatgaatttttgactaatgatatggattcatatatgaaaaattttgaagtgcttgcaacagataattttaaggcaaaagaagttagaagcacatctgccattaatttgggtgtaagggtagaaaataatttgctagacatagatttttctagcttggacttcgatccagcagagcttcaggagataatgaagcagtacaaattaaagaagagataccatagattaaaagacggaagcttcgtaaatctggaagataatgatactatcaaatttatagagagtgtaaccgaagatatagatgttgattacggtcaaataaaaaacaatactttacagttaccaatgtacagggctctttatttagataaaattttggagaagaatagctttattcatgttacgaaagatgagagctacaagaatttagttgaaaatatcgatgtaaaagaaatagaaggaaacatggaagtgccaaagaacctgaatgctagccttagagaataccaaaaagtaggtgtacaatggttacgtatgcttgattactacggtttgggcggaattttggcagatgatatgggtcttggaaaaactgttcagctattgtgtgtaatttgtgcatacaaagataatggaggaaagaaaccatgtttagtcgtatgcccaagttcattatgcttaaactggcagaatgaagcggaaaaatttacgataggaatgcaatctatagtagtacatggaacactagaagaaagaaaaaaccagattgcatcaataccaaattatgatatagtaataacttcatatgaattattgaagagagatatagaagaatataaaaaatatgacttcaaatttaaatacataattgcagatgaagcacagtacataaaaaataataacacacaaaatgcaaaggcaattaagaatatatcagcagaaacaaggtttgcactaactggaacgccaatagaaaactctttgtctgagctatggtcaatattcgatttcataatgccaggctacttatttggatacagaaaattcaaagagctttatgaaacgccaataataaaagagggcaatgaagtggcaatgaacaaattgaaaaaattgatagagccatttgtcttaagaagaataaaaggtgaagtcttaacagagctaccagataaaatgatatctgttctaaatagccagatggtggacgagcaaagagatatttatttgtcttatttagcaaaggcaaagaaaaatgcaatggaagaaatacaagaaaatggaatagaaaagagccagataaaaatacttgcactgttaacaagattaagacaaatatgttgccacccaagtctatttatagacaactacaagggcgaaagcggtaagctgaaccaatgtatagaaatagtaaaagatgcaatacaatcaggacacaaaatactactattttcaggatacacggcaatgtttgaaataatagaaaaagaactacaaaaagagaatatagaattcttaaaattaacaggacaaaccaaagtatctgaaagaataaatttagtagatgaatttaacagtaatccaaacaaaaaattattcttaatatctttaaaagcaggtggaacaggactgaacttagttggagcagatgtggtaatacactatgacccatggtggaacttatctgcagaaaatcaggctacagatagaacctacagaataggacaaaagagaaacgtacaagtatataaattaataacaaaaaactcaatagaagagaaaatatatgaactacaaaaaagaaaagaaactttgattgatagcatgctttcaacaaaccaaacatttataagcaagctttcaaaagaagatataatgaatttgtttgaataa

SEQ ID NO: 2894 - DNA, 840 bp, Unknown
  Unknown gut bacteria
atgattgtagaccagataaagaaaagagaaaataagctaataaataacaaaaattctagaattgacataccagtcggaaaatgggtaaagtgtgaaaattgcaaagaaattttatacaaggaaaatctgagaaacaatttaagtgtgtgccctaattgtggtcattattttagaatgcatattggcagaaggctagagcaaataatagatgaaggaacatataaaaggtttaatttaaacatagatactaccaatccattaggactggaagattatgaaaagaaaataaagtcattaagagaaaagacaaggctcgaggaagcagtaagctgtggaataggcaagataaatggagaagatgtagtaatatgcataatggatagtggttttttgatgggtagcatgggtgcagtagtgggtgaaaaaataacatacagcatagaaaaggcaattgaatttaagatgccaattgtaatattttgttgctctggaggtgcaagaatgcaagaaggaataatatcacttatgcagatggcaaaaactactgctgcactaacaaagctagacaaagcaggcttgttgtatatatctgtactaacagacccaacatatggtggagttacggcttcttttgcaagcttaggagatataattttagcagaaccgggtgcaatgattgggtttgcagggcaaagagtaataaaacaaaccattggagaagagctacctgaaggatttcaaactgcagagtttttgctagaacatgggtttatagacaaaatagtagaaagaaaagatatgaaagaaacactaagcagactattaaaattaaatagatga

SEQ ID NO: 2895 - DNA, 1017 bp, Unknown
  Unknown gut bacteria
atggaaaaagtaaaaaggattttaacaggagatagaccaacaggaaaacttcatataggtcattattttggctctttaaagaagagggtagaaatgcaagattcaggtttatatgatccatatattttaattgccgatgtgcaagcattaacagataattttaacaatccagaaaaagtaagaaaaaatgtaatagaagttgcaatggattatttatctgttggaatagaccctgaaaagacaacaatatatattcaatctatgataccagaagttgctgaacttacagtgttttactctaatttagtaactattgcaaggctagaaaggaatccaaccgttaaaacagaaatagctcaaaaaagagatgtattcggagaaagtgttacatatggatttttaggatatccagtaagccaagcagctgatataacatgtttcgaaggcgaattagtcccagttggggaagaccagttaccattaattgaacagtgcagagaaattgttagaaaatttaattctatctatggagatgttttaatagaaccagaagcagtcttatcatcagcaaaaagaataaaaggcttagacggaaacgagaaaatgggaaaatctctaggaaatgcaatatatttatctgatagcgaagaagaaataacaagaaaagttatgagcgctgtaacagatccaaagagaataaaaaaagacgatttaggaaaccctgatgtatgtatggtcgcatactatcacaatttattctcaacaaaagaagaatatgaaaacgtatgcacagaatgtagagcaggaagccgtggctgtgtagcttgtaaaaaacaactagctcataacataatagaaactttaagaccaattagagaaaagagaaaatattatgaagaccatccagaaatagtagataaaatactgatggaaggaacagcaaaggctcaaaaagtcgcacaagagacgatgaaaaaagtaaagaaagcaatgaaattagattatttcgcccactag

SEQ ID NO: 2896 - DNA, 669 bp, Unknown
  Unknown gut bacteria
atgtatttaataatgttaggagctcaaggaactggaaaaggtacagtagcaggaatattagcaaaagaaacaggctggccacaaatttcaacaggagatatttttagagccaatatatcaaataacactgaattgggaaagaaagcaaacgaatatatatcaaaaggacaacttgttccagatgatataacggttccaatggttataaatagactaagtgaagatgattgcaaagatggagctatattagatggcttcccacgtacagttgagcaagcagaaaagcttgatgaaattcttgctgaaaagagtaagaaggttgatttagtaataaatttaacaacaccaagagacgaaattattacaagaatcttaaacagaagagtatgttcaaatccagaatgcaaagcaacatacaatataacaatgcatccatctaaagtagaaggaatatgcgatatttgtggttctaaactagttcaaagaggagacgatagtgacgaaaacgcaataaaacaaagattggcaatatatgatgaaaaaacaagtccattaatagatttctatacaaagaaaggtgttttagtaactgaagaagttagtgaaaaaataaatagacttggaaaagaagctgcagaagatgtattaaataagataaaaaatatgtag

SEQ ID NO: 2897 - DNA, 2388 bp, Unknown
  Unknown gut bacteria
atgattttaagtacgaattttttaaaagattatttagatatagattttgatactactgataaaatacatgagcttgcagagaatatgactaaggttggaaatgaatatgattctgctaagaagcttattgatgctactaatttgactattggagaggttttagagtgtgaaatgcacccagattctgaccatttgcatgtgtgcaaggttaatgtgggagatgaagttttgcaaattgtttgtggtgctccaaatgttagaaagggtttgaaggttatcgtcgcacttcctggtgcaaaacttccaggtggaactataagcaaaagtatgaaacgtggagttgagtctaatggtatgttgtgctctattgctgaacttggattggaaagcaagtttttaaatccagaggataaagatggaatacacgagttgccagccgatgctcctgttggcgaggatcctattaaatatatgcagatggatgatggagttatcgattttgaacttactgcaaaccgtggagatttactaagtattttaggaatggcttatgaagttggtgcaatttatgataaaaaagttaaagatgttgatttgtctcatggacaaaataacgaaaatattgcagatagctttaagttaaatataaatacagataattgtacaatgttcttggctaagaaagttgagaatgtagagattaaggaaagtccaacatttattaagaatagacttattgcatgtggaataagacctataaataatgttgtagatattagcaactatgtaatgctagagctaggtcaacctcttcatttctatgatgcagataaacttcagaatgttatagaagttagaatggctgaaaatggcgagaagctaactactttagataacatagaaagaacacttacatcagatgatattgtaatatcaaatggaaaagaggccataggtcttgcgggtgttatgggcggactagacacagaaattacagaaaatactaagaatgtaatagtagaagccgcaatatttaatcaagtaaaagtaagaaaaactgcacaaaaaatagtaagaagcgaagcaagcaatcgctttgaaaaaggactagatccaaacagaacttatatggctgctgagcgtgctgtgaaacttcttgaagaatatgcaaatggaactgttgttggtggaacagtagaatataacaaagaagatatgtctgacaaagtaatagaaattacatataaaaaaataaatgatgttttaggaacagaattgccaaagcaagatgttctagatgtatttagaaaattaggatttagttgcaaacaggacggagaaaaaattgaagtttctgttccaagaagaagactagatatttctattaaagaagatttaatagaagaagttggacgtatatatggagttgacaatattgcttcaaaagtaccagtaatgccaataaaacttggaagttatgataagactacaagagaaataagacacaaaatgatgaatttaggattaaatgagactctatcatatgtattggtaaatgaaaaagaagcaaagaactatgcaggttatgacaagaaagaagaatttgaggcaataaaactattatctccacttacagaagacagaagcacattaagatgcagtataatcacatctttatataagatatatgaatacaatgttgcacattataacaaaaacgtatcaatattcgaaataggaaaatcattctacaaaaaaaaccaaacatacaacgaagaaaacaaactagcatgtttaatgacaggcgatttctatgcaggaataaacagcgaaaagaaagttgatttctacattattaaaggaattgcagaagagttattagatttcttaggatatgccggaagatacagttttgttgtaaaagacaatatgccaaaagaattacatccaggtcaatctgcatacatatctgtaaataacgatatagttggaataataggaaaaatacacccagaaataaacaaagaagcagtatttgtaatggaaataaatctagacaaattgctagaaaagaaaactggaaaaatgaaatacaaagaaatttctaaatatccaacagtaaagaaagacatagcaatagtcgtagacaaaaaaataactgccggagatatagcaatgcaaataaaaaaagcagccggttcattactaataaatagtgaagtgtttgatgtttacacaggcacaggaatagaagaaggcaaaaagagcttagcgtattcactaacatttggaagcaacgacagaacactaacagacgaagaaataaatgcaatactagaaaaaataatagacaaactttcaaaaataggagaagtaagaaacaaataa

SEQ ID NO: 2898 - DNA, 921 bp, Unknown
  Unknown gut bacteria
atgaacaatgaaaaaataacagaaacatatgatgtattaaaaacttttataccaaaagaagatatttacttaaatgaaccaatgagtaagcatactacttttaaaataggcggaaatgcagatatattcgttaaattgaagagtgtagaacaaattgagaaaacaatcgaaacaacacgaaaaataggagtgccattaaaatttataggaaatggtagcaatattttagtaaaagacgaaggaattagaggagttgtggcgaagatatgtactagtacatatgattttatagatgaaactacattaagacttgacagtggattgttaaatgcgaaggtcgcaagaattctattagaccataatcttgctggttttgaatttgcatcaggcattccaggaactcttggaggagctgtgaagatgaatgctggtgcttatggtagtgagatgaagaacatagttgtaagtacaagatatatagatttagacagtgacaagattgaaataaaagaaattaacaatgcagagcatgaatttagttatagacacagtattttctcaaataaaaatgctataataatagatacaactctaagacttcaaacaggaaataaagacgagattgaagaaaaactatgcaataatcttgataacagaagagaaaaacagccaatagataagccaagtgcaggaagtacttttaaaagaggagaagattttataacagcccaattaattgacgagtgtggattaaaaggttatacagttggtggagcacaggtgtcggaaaaacatgcaggctttgtggtaaacatcggaaatgcaactgcaaaagacgttatagaacttacagaatacgtaaagaaaaaagtgtatgagaaatttaacaagaaaatagaattggaaatagaaattgtataa

SEQ ID NO: 2899 - DNA, 2196 bp, Unknown
  Unknown gut bacteria
atgtcggaaaacgtaaatcacaccatagaagaagtattagaaaatgcaaaaaaatctaatagaagagcagatttaaaattaataagaagagcatatgattttgcaaagtctaaacatggagaccaattaagaaggtctggagaaccatacataatccatccggttcaagttgcatatatattgtctacacttggacttgatgagagcactatttgtgctgctcttttacatgatgtaattgaagatacagatgtaactttgcaagatttgtctaaggaattttcgccagagattgcagaaatggttgatggtgttacaaagcttggaaaattaaattatacgagtgaacaagagcaacaagttgaaaactacagaaaaatgttcttggcaatgggaaaagacataagagtaattcttattaaattagccgatagacttcataacatgagaacattaaaatatttggccagagaccgtcaaattgcaaatgcaagggagacaatggacttgtatgctccacttgcaaatagacttggtatgtattctttaaaatgggaactagaggatttatcatttaaatatttatacccagaggaatatagagaacttgttgaaggaatagacaagaagagagaagaaaggttgaaattcatcgaccagattatggacgagataagagttcaattaaaaaagcaaaaaatagaagctgaaataactggtagagcaaagcatttatatagtatttttagaaaaatgcagagagacaataagactctggaccagatttatgatttattcgcattaagaattattgtaaattctgtaaaggattgttatgcggcattaggtgttgtgcatgagctttataacccaatgccaggaagatttaaggattatatttcggttccaaaacctaacatgtaccaatctttacacacaactttgataggaccaaaaggaactccattcgaggtacagattcgtacttgggatatgcatagaatagccgaatatggtattgccgcacactgggcctacaaagaggcaagcttcatgggaggcaagaaggcaaatgtagtagtaaatcaagataaattatcttggctaagagaaacacttgaatggcaaaaagacatgcaagacccacaagagttcttaaatacattaaaaacagagttgtttgaagatgaggtttatgtgtttactccaaagggaaaaattcaagtattaccaagaggagccacaccaatagattttgcttatagtattcatgaagaaataggaaaccatatgactggctgtaagataaacagcaagatgatgcctattgtaacaaaattaaaaaatggtgatattgtagagattattacatcagataaatctaaaggaccaagtagagactggcttaaatttataaagagtagtacagcaaagactagaattcaacaatggttcaagaaaaatgaaagagtagaaaacattgcaagaggaaaagactttttagaaaaagaagtaaagaaaattggaatgagctacccagaattgtttagaccggagtttgttgaagctgcacttgaaagatacaaatataatagtgcagatgacatgtttgcaagtgttggattcggaacaattacagcaaataaaatagtttcaagagtacttgaagaatacagaaaagttcataaagaagaaaatctagaagaaaaaatagaagaacttacaaaggaaaagacaaacaacaaaccatcaacaagtggtgtaattgtaaaaggaatagacaactgtctagtaaaactatcaaaatgttgtaacccagtaccaggagacgaaattgttggatatattacaaaaggaagaggcgtatctgtacatagaaaagactgcaagaacgtaaaagacttggtatctgaagaaaacagaatgatagatgtttcatggtatacagacaaaccatcgagctataatgttgatgttgtagtattttcaaatgatagagatggattgcttgcagacataattgcaacaataactgcagaaaaaacacctataatggcggtatcatcaaaagtatctaaagaaagaatagtattaacggaattaacgctagaagtaagcaatatagcacagttgaacagtgttttaaaagcaataagaaaaatagacagcgtatatgaagtaagaagaaataaataa

SEQ ID NO: 2900 - DNA, 1131 bp, Unknown
  Unknown gut bacteria
atgaaaaaagaaaagaacgatataaagctatggttattctggttttcgcttgcagtagcaataatagcagcctataacatattaggaaatttagtaggagtggctcaaataataggaagcatacttggagcaataatgccattttgtataggattattaatagcatatatattatacatgccatgtagaagcatagaaacattatttaaaaaatcgaagaaaaaaagcttcgtaaacaaacatgcaagaggattaagtatattaacaacatacataattgcacttatagtaattgtaataattttaaacgtaataattccaattgtagtacaaagtttgtcagatttatttacaaatttaccaggctattacaacagcgttacagaaaaaataaatgaacttccagaagataacatactaagaagcgaaaaagccactgaaataataaataacataaaaaatattgattttacagcattattcaatatggaaagaattcagcaatatattaaaagcgtcataagtgctatggaaacaatactagatgcattcatcgcagtaatagtttctgtatacatattagcacagagaaacgcaataataagattcttatctaaatttacaaaagcagttgcttcaaaaaatgcatatgaaaaaataaaaaaatatttcatgaaatcaaacagtgtattttttaaattcctaacaagccaggtactagatgcaatattagtaggagtattagtatcggttgcattatcaatactacaagtaaaatatgcagtactattaggctttatgataggactatttaacctaataccatactttggagcgatagtagcagttgtaattgcaatactaattacagtattaacaggcggaattggaaaagccttattaatgacagtagttgtagtaatactacagcaaatagatgcaaacataataaatcctaaaatagtaggagactcactagaaattagccagttacttgtaatatttgcggtaacactaggtggagcatactttggagtaattggaatgttcttagcagtaccagttgcaacagtaataaaattaataatagaagacttcatagaagaaagagaaaaaagcaaaggaatataa
